United States Patent Application Publication US 2021/0272652 A1 - sequence listing, part 5

SEQ ID NO: 68864 - DNA, 120 bp, Homo sapiens
  misc_feature: 810 for SV(C|O) and mtDNA
cgtgaagtccgtggaagcctgtggctacaaaaaatgttgagccgtagatgccgtcggaaatggtgaagggagactcgaagtactctgaggcttgtaggagggtaaaatagagacccagta

SEQ ID NO: 68865 - DNA, 120 bp, Homo sapiens
  misc_feature: 810 for SV(C|O) and mtDNA
ctctgagctaaacctagccccaaacccactccaccttactaccagacaaccttagccaaaccatttacccaaataaagtataggcgatagaaattgaaacctggcgcaatagatatagta

SEQ ID NO: 68866 - DNA, 120 bp, Homo sapiens
  misc_feature: 810 for SV(C|O) and mtDNA
gttatttctagttaattcattatgcagaaggtataggggttagtccttgctgtattatgcttggttataatttttcatctttcccttgcggtactatatctattgcgccaggtttcaatt

SEQ ID NO: 68867 - DNA, 120 bp, Homo sapiens
  misc_feature: 810 for SV(C|O) and mtDNA
gtcattggtgttcttgtagttgaaatacaacgatggtttttcatatcattggtcgtggttgtagtccgtgcgagaataatgatgtatgctttgtttctgttgagtgtgggtttagtaatg

SEQ ID NO: 68868 - DNA, 120 bp, Homo sapiens; identical to SEQ ID NO: 56358
  misc_feature: 810 for SV(C|O) and mtDNA

SEQ ID NO: 68869 - DNA, 120 bp, Homo sapiens
  misc_feature: 810 for SV(C|O) and mtDNA
ataattaaggagatttgtagggagattagtatagagaggtagagtttttttcgtgatagtggttcactggataagtggcgttggcttgccatgattgtgaggggtaggagtcaggtagtt

SEQ ID NO: 68870 - DNA, 120 bp, Homo sapiens
  misc_feature: 810 for SV(C|O) and mtDNA
agtcagtagaattagaattgtgaagatgataagtgtagagggaaggttaatggttgatattgctagggtggcgcttccaattaggtgcatgagtaggtggcctgcagtaatgttagcggt

SEQ ID NO: 68871 - DNA, 120 bp, Homo sapiens
  misc_feature: 810 for SV(C|O) and mtDNA
aaaccatttacccaaataaagtataggcgatagaaattgaaacctggcgcaatagatatagtaccgcaagggaaagatgaaaaattataaccaagcataatacagcaaggactaacccct

SEQ ID NO: 68872 - DNA, 120 bp, Homo sapiens
  misc_feature: 809 for SV(C|O) and mtDNA
tgtgttggcatctgctcgggcgtatcatcaactgatgagcaagaaggatataattcctacgccctctcagccgatgaacagttggaataggttgttagcggtaactaagattagtatggt

SEQ ID NO: 68873 - DNA, 120 bp, Homo sapiens; identical to SEQ ID NO: 53180
  misc_feature: 809 for SV(C|O) and mtDNA

SEQ ID NO: 68874 - DNA, 120 bp, Homo sapiens
  misc_feature: 809 for SV(C|O) and mtDNA
tgaccgctctgagctaaacctagccccaaacccactccaccttactaccagacaaccttagccaaaccatttacccaaataaagtataggcgatagaaattgaaacctggcgcaatagat

SEQ ID NO: 68875 - DNA, 120 bp, Homo sapiens; identical to SEQ ID NO: 53499
  misc_feature: 809 for SV(C|O) and mtDNA

SEQ ID NO: 68876 - DNA, 120 bp, Homo sapiens
  misc_feature: 809 for SV(C|O) and mtDNA
gtgtagagggaaggttaatggttgatattgctagggtggcgcttccaattaggtgcatgagtaggtggcctgcagtaatgttagcggttaggcgtacggccagggctattggttgaatga

SEQ ID NO: 68877 - DNA, 120 bp, Homo sapiens
  misc_feature: 809 for SV(C|O) and mtDNA
taatgagtcgaaatcattcgttttgtttaaactatataccaattcggttcagtctaatcctttttgtagtcactcataggccagacttagggctaggatgatgattaataagagggatga

SEQ ID NO: 68878 - DNA, 120 bp, Homo sapiens
  misc_feature: 809 for SV(C|O) and mtDNA
tatgtgctgttaagggtgagtaggtttgttggtatcctagtgggtgaggggtggctttggagttgcagttgatgtgtgatagttgagggttgattgctgtacttgcttgtaagcatgggg

SEQ ID NO: 68879 - DNA, 120 bp, Homo sapiens
  misc_feature: 809 for SV(C|O) and mtDNA
gaccgctctgagctaaacctagccccaaacccactccaccttactaccagacaaccttagccaaaccatttacccaaataaagtataggcgatagaaattgaaacctggcgcaatagata

SEQ ID NO: 68880 - DNA, 120 bp, Homo sapiens; identical to SEQ ID NO: 53447
  misc_feature: 809 for SV(C|O) and mtDNA

SEQ ID NO: 68881 - DNA, 120 bp, Homo sapiens
  misc_feature: 809 for SV(C|O) and mtDNA
tacggtaaatggctttatgtactatgtgctgttaagggtgagtaggtttgttggtatcctagtgggtgaggggtggctttggagttgcagttgatgtgtgatagttgagggttgattgct

SEQ ID NO: 68882 - DNA, 120 bp, Homo sapiens; identical to SEQ ID NO: 53305
  misc_feature: 809 for SV(C|O) and mtDNA

SEQ ID NO: 68883 - DNA, 120 bp, Homo sapiens
  misc_feature: 809 for SV(C|O) and mtDNA
gattattacaaatgcatgggctgtgacgataacgttgtagatgtggtcgttacctagaaggttgcctggctggcccagctcggctcgaataaggaggcttagagctgtgcctaggactcc

SEQ ID NO: 68884 - DNA, 120 bp, Homo sapiens
  misc_feature: 809 for SV(C|O) and mtDNA
gagctaaacctagccccaaacccactccaccttactaccagacaaccttagccaaaccatttacccaaataaagtataggcgatagaaattgaaacctggcgcaatagatatagtaccgc

SEQ ID NO: 68885 - DNA, 120 bp, Homo sapiens
  misc_feature: 809 for SV(C|O) and mtDNA
gattagtagtagttactggttgaacattgtttgttggtgtatatattgtaattgagattgctcgggggaataggttatgtgattaggagtagggttaggatgagtgggaagaagaaagag

SEQ ID NO: 68886 - DNA, 120 bp, Homo sapiens
  misc_feature: 809 for SV(C|O) and mtDNA
actatgtgctgttaagggtgagtaggtttgttggtatcctagtgggtgaggggtggctttggagttgcagttgatgtgtgatagttgagggttgattgctgtacttgcttgtaagcatgg

SEQ ID NO: 68887 - DNA, 120 bp, Homo sapiens; identical to SEQ ID NO: 54460
  misc_feature: 809 for SV(C|O) and mtDNA

SEQ ID NO: 68888 - DNA, 120 bp, Homo sapiens
  misc_feature: 809 for SV(C|O) and mtDNA
aatggggtttgtggggttttcttctaagccttctcctatttatgggggtttagtattgattgttagcggtgtggtcgggtgtgttattattctgaattttgggggaggttatatgggttt

SEQ ID NO: 68889 - DNA, 120 bp, Homo sapiens
  misc_feature: 808 for SV(C|O) and mtDNA
tccatcgctaaccccactaaaacactcaccaagacctcaacccctgacccccatgcctcaggatactcctcaatagccatcgctgtagtatatccaaagacaaccatcattccccctaaa

SEQ ID NO: 68890 - DNA, 120 bp, Homo sapiens; identical to SEQ ID NO: 53121
  misc_feature: 808 for SV(C|O) and mtDNA

SEQ ID NO: 68891 - DNA, 120 bp, Homo sapiens
  misc_feature: 808 for SV(C|O) and mtDNA
ttcatcggctgagagggcgtaggaattatatccttcttgctcatcagttgatgatacgcccgagcagatgccaacacagcagccattcaagcaatcctatacaaccgtatcggcgatatc

SEQ ID NO: 68892 - DNA, 120 bp, Homo sapiens; identical to SEQ ID NO: 57325
  misc_feature: 808 for SV(C|O) and mtDNA

SEQ ID NO: 68893 - DNA, 120 bp, Homo sapiens
  misc_feature: 808 for SV(C|O) and mtDNA
gctttggtgagggaggtaggtggtagtttgtgtttaatatttttagttgggtgatgaggaatagtgtaaggagtatgggggtaattatggtgggccatacggtagtatttagttggggca

SEQ ID NO: 68894 - DNA, 120 bp, Homo sapiens
  misc_feature: 808 for SV(C|O) and mtDNA
tgataggggaagtagcgtcttgtagacctacttgcgctgcatgtgccattaagatatataggatttagcctataatttaactttgacaaagttatgaaatggtttttctaataccttttt

SEQ ID NO: 68895 - DNA, 120 bp, Homo sapiens
  misc_feature: 808 for SV(C|O) and mtDNA
tgaatctgacaacagaggcttacgaccccttatttaccgagaaagctcacaagaactgctaactcatgcccccatgtctaacaacatggctttctcaacttttaaaggataacagctatc

SEQ ID NO: 68896 - DNA, 120 bp, Homo sapiens
  misc_feature: 808 for SV(C|O) and mtDNA
agatggagacatacagaaatagtcaaaccacgtctacaaaatgccagtatcaggcggcggcttcgaagccaaagtgatgtttggatgtaaagtgaaatattagttggcggatgaagcaga

SEQ ID NO: 68897 - DNA, 120 bp, Homo sapiens
  misc_feature: 808 for SV(C|O) and mtDNA
ccgctctgagctaaacctagccccaaacccactccaccttactaccagacaaccttagccaaaccatttacccaaataaagtataggcgatagaaattgaaacctggcgcaatagatata

SEQ ID NO: 68898 - DNA, 120 bp, Homo sapiens; identical to SEQ ID NO: 55406
  misc_feature: 808 for SV(C|O) and mtDNA

SEQ ID NO: 68899 - DNA, 120 bp, Homo sapiens
  misc_feature: 808 for SV(C|O) and mtDNA
gtcagtagaattagaattgtgaagatgataagtgtagagggaaggttaatggttgatattgctagggtggcgcttccaattaggtgcatgagtaggtggcctgcagtaatgttagcggtt

SEQ ID NO: 68900 - DNA, 120 bp, Homo sapiens
  misc_feature: 808 for SV(C|O) and mtDNA
agtgactatatggatgccccccaccctaccacacattcgaagaacccgtatacataaaatctagacaaaaaaggaaggaatcgaaccccccaaagctggtttcaagccaaccccatggcc

SEQ ID NO: 68901 - DNA, 120 bp, Homo sapiens
  misc_feature: 808 for SV(C|O) and mtDNA
ggatgaggcaggaatcaaagacagatactgcgacatagggtgctccggctccagcgtctcgcaatgctatcgcgtgcacaccccccagacgaaaataccaaatgcatggagagctcccgt

SEQ ID NO: 68902 - DNA, 120 bp, Homo sapiens
  misc_feature: 808 for SV(C|O) and mtDNA
gaatttgcaattcaatatgaaaatcacctcggagctggtaaaaagaggcctaacccctgtctttagatttacagtccaatgcttcactcagccattttacctcacccccactgatgttcg

SEQ ID NO: 68903 - DNA, 120 bp, Homo sapiens; identical to SEQ ID NO: 56001
  misc_feature: 808 for SV(C|O) and mtDNA

SEQ ID NO: 68904 - DNA, 120 bp, Homo sapiens
  misc_feature: 807 for SV(C|O) and mtDNA
tttgaagtatacttgaggagggtgacgggcggtgtgtacgcgcttcagggccctgttcaactaagcactctactctcagtttactgctaaatccaccttcgacccttaagtttcataagg

SEQ ID NO: 68905 - DNA, 120 bp, Homo sapiens; identical to SEQ ID NO: 53166
  misc_feature: 807 for SV(C|O) and mtDNA

SEQ ID NO: 68906 - DNA, 120 bp, Homo sapiens; identical to SEQ ID NO: 54564
  misc_feature: 807 for SV(C|O) and mtDNA

SEQ ID NO: 68907 - DNA, 120 bp, Homo sapiens
  misc_feature: 807 for SV(C|O) and mtDNA
agtggttaattaattttattagggggttaattttgcgtattggggtcattggtgttcttgtagttgaaatacaacgatggtttttcatatcattggtcgtggttgtagtccgtgcgagaa

SEQ ID NO: 68908 - DNA, 120 bp, Homo sapiens; identical to SEQ ID NO: 56858
  misc_feature: 807 for SV(C|O) and mtDNA

SEQ ID NO: 68909 - DNA, 120 bp, Homo sapiens; identical to SEQ ID NO: 53976
  misc_feature: 807 for SV(C|O) and mtDNA

SEQ ID NO: 68910 - DNA, 120 bp, Homo sapiens
  misc_feature: 807 for SV(C|O) and mtDNA
tcttagagcgaaagcctataatcactgcgcccgctcataaggggatggccatggctaggtttatagatagttgggtggttggtgtaaatgagtgaggcaggagtccgaggaggttagttg

SEQ ID NO: 68911 - DNA, 120 bp, Homo sapiens
  misc_feature: 807 for SV(C|O) and mtDNA
tattcatggtggctggcagtaatgtacgaattacatagcggttgttgatgggtgagtcaatacttgggtggcacccaaatctgcttccccatgaaagaacagagaatagtttaaattaga

SEQ ID NO: 68912 - DNA, 120 bp, Homo sapiens
  misc_feature: 807 for SV(C|O) and mtDNA
atgtgctgttaagggtgagtaggtttgttggtatcctagtgggtgaggggtggctttggagttgcagttgatgtgtgatagttgagggttgattgctgtacttgcttgtaagcatgggga

SEQ ID NO: 68913 - DNA, 120 bp, Homo sapiens
  misc_feature: 807 for SV(C|O) and mtDNA
gctcataaggggatggccatggctaggtttatagatagttgggtggttggtgtaaatgagtgaggcaggagtccgaggaggttagttgtggcaataaaaatgattaaggatactagtata

SEQ ID NO: 68914 - DNA, 120 bp, Homo sapiens
  misc_feature: 807 for SV(C|O) and mtDNA
taatttattaatgcaaacagtacctaacaaacccacaggtcctaaactaccaaacctgcattaaaaatttcggttggggcgacctcggagcagaacccaacctccgagcagtacatgcta

SEQ ID NO: 68915 - DNA, 120 bp, Homo sapiens
  misc_feature: 807 for SV(C|O) and mtDNA
taacacccatagtaggcctaaaagcagccaccaattaagaaagcgttcaagctcaacacccactacctaaaaaatcccaaacatataactgaactcctcacacccaattggaccaatcta

SEQ ID NO: 68916 - DNA, 120 bp, Homo sapiens; identical to SEQ ID NO: 55834
  misc_feature: 807 for SV(C|O) and mtDNA

SEQ ID NO: 68917 - DNA, 120 bp, Homo sapiens
  misc_feature: 807 for SV(C|O) and mtDNA
taagtctggcctatgagtgactacaaaaaggattagactgaaccgaattggtatatagtttaaacaaaacgaatgatttcgactcattaaattatgataatcatatttaccaaatgcccc

SEQ ID NO: 68918 - DNA, 120 bp, Homo sapiens
  misc_feature: 807 for SV(C|O) and mtDNA
gtggctggcagtaatgtacgaattacatagcggttgttgatgggtgagtcaatacttgggtggcacccaaatctgcttccccatgaaagaacagagaatagtttaaattagaatcttagc

SEQ ID NO: 68919 - DNA, 120 bp, Homo sapiens
  misc_feature: 807 for SV(C|O) and mtDNA
gtgactatatggatgccccccaccctaccacacattcgaagaacccgtatacataaaatctagacaaaaaaggaaggaatcgaaccccccaaagctggtttcaagccaaccccatggcct

SEQ ID NO: 68920 - DNA, 120 bp, Homo sapiens
  misc_feature: 807 for SV(C|O) and mtDNA
cgaatgatttcgactcattaaattatgataatcatatttaccaaatgcccctcatttacataaatattatactagcatttaccatctcacttctaggaatactagtataccgctcacacc

SEQ ID NO: 68921 - DNA, 120 bp, Homo sapiens
  misc_feature: 807 for SV(C|O) and mtDNA
gctgcaccatcgggatgtcctgatccaacatcgaggtcgtaaaccctattgttgatatggactctagaataggattgcgctgttatccctagggtaacttgttccgttggtcaagttatt

SEQ ID NO: 68922 - DNA, 120 bp, Homo sapiens
  misc_feature: 807 for SV(C|O) and mtDNA
atgttacttatactaacattagttcttctatagggtgatagattggtccaattgggtgtgaggagttcagttatatgtttgggattttttaggtagtgggtgttgagcttgaacgctttc

SEQ ID NO: 68923 - DNA, 120 bp, Homo sapiens
  misc_feature: 807 for SV(C|O) and mtDNA
ctggcagtaatgtacgaattacatagcggttgttgatgggtgagtcaatacttgggtggcacccaaatctgcttccccatgaaagaacagagaatagtttaaattagaatcttagctttg

SEQ ID NO: 68924 - DNA, 120 bp, Homo sapiens
  misc_feature: 807 for SV(C|O) and mtDNA
acggtaaatggctttatgtactatgtgctgttaagggtgagtaggtttgttggtatcctagtgggtgaggggtggctttggagttgcagttgatgtgtgatagttgagggttgattgctg

SEQ ID NO: 68925 - DNA, 120 bp, Homo sapiens
  misc_feature: 807 for SV(C|O) and mtDNA
cagataaggaaaatgattatgagggcgtgatcatgaaaggtgataagctcttctatgataggggaagtagcgtcttgtagacctacttgcgctgcatgtgccattaagatatataggatt

SEQ ID NO: 68926 - DNA, 120 bp, Homo sapiens; identical to SEQ ID NO: 57555
  misc_feature: 807 for SV(C|O) and mtDNA

SEQ ID NO: 68927 - DNA, 120 bp, Homo sapiens
  misc_feature: 806 for SV(C|O) and mtDNA
tttggcgtaggtttggtctagggtgtagcctgagaataggggaaatcagtgaatgaagcctcctatgatggcaaatacagctcctattgataggacatagtggaagtgagctacaacgta

SEQ ID NO: 68928 - DNA, 120 bp, Homo sapiens; identical to SEQ ID NO: 56182
  misc_feature: 806 for SV(C|O) and mtDNA

SEQ ID NO: 68929 - DNA, 120 bp, Homo sapiens
  misc_feature: 806 for SV(C|O) and mtDNA
acccgtatacataaaatctagacaaaaaaggaaggaatcgaaccccccaaagctggtttcaagccaaccccatggcctccatgactttttcaaaaaggtattagaaaaaccatttcataa

SEQ ID NO: 68930 - DNA, 120 bp, Homo sapiens
  misc_feature: 806 for SV(C|O) and mtDNA
tgtgctgttaagggtgagtaggtttgttggtatcctagtgggtgaggggtggctttggagttgcagttgatgtgtgatagttgagggttgattgctgtacttgcttgtaagcatggggag

SEQ ID NO: 68931 - DNA, 120 bp, Homo sapiens; identical to SEQ ID NO: 53563
  misc_feature: 806 for SV(C|O) and mtDNA

SEQ ID NO: 68932 - DNA, 120 bp, Homo sapiens
  misc_feature: 806 for SV(C|O) and mtDNA
agagaaaaagtctttaactccaccattagcacccaaagctaagattctaatttaaactattctctgttctttcatggggaagcagatttgggtgccacccaagtattgactcacccatca

SEQ ID NO: 68933 - DNA, 120 bp, Homo sapiens; identical to SEQ ID NO: 53585
  misc_feature: 806 for SV(C|O) and mtDNA

SEQ ID NO: 68934 - DNA, 120 bp, Homo sapiens
  misc_feature: 806 for SV(C|O) and mtDNA
gtgaatgttataattaaggagatttgtagggagattagtatagagaggtagagtttttttcgtgatagtggttcactggataagtggcgttggcttgccatgattgtgaggggtaggagt

SEQ ID NO: 68935 - DNA, 120 bp, Homo sapiens
  misc_feature: 806 for SV(C|O) and mtDNA
gtactatgtgctgttaagggtgagtaggtttgttggtatcctagtgggtgaggggtggctttggagttgcagttgatgtgtgatagttgagggttgattgctgtacttgcttgtaagcat

SEQ ID NO: 68936 - DNA, 120 bp, Homo sapiens
  misc_feature: 806 for SV(C|O) and mtDNA
gatgaggcaggaatcaaagacagatactgcgacatagggtgctccggctccagcgtctcgcaatgctatcgcgtgcacaccccccagacgaaaataccaaatgcatggagagctcccgtg

SEQ ID NO: 68937 - DNA, 120 bp, Homo sapiens
  misc_feature: 806 for SV(C|O) and mtDNA
ctaaacctagccccaaacccactccaccttactaccagacaaccttagccaaaccatttacccaaataaagtataggcgatagaaattgaaacctggcgcaatagatatagtaccgcaag

SEQ ID NO: 68938 - DNA, 120 bp, Homo sapiens
  misc_feature: 806 for SV(C|O) and mtDNA
ctatccggaatgccccgacgttactcggactaccccgatgcatacaccacatgaaacatcctatcatctgtaggctcattcatttctctaacagcagtaatattaataattttcatgatt

SEQ ID NO: 68939 - DNA, 120 bp, Homo sapiens; identical to SEQ ID NO: 54700
  misc_feature: 806 for SV(C|O) and mtDNA

SEQ ID NO: 68940 - DNA, 120 bp, Homo sapiens
  misc_feature: 806 for SV(C|O) and mtDNA
agtcatattaagttgttggctcaggagtttgatagttcttgggcagtgagagtgagtagtagaatgtttagtgagcctagggtgttgtgagtgtaaattagtgcgatgagtaggggaagg

SEQ ID NO: 68941 - DNA, 120 bp, Homo sapiens
  misc_feature: 806 for SV(C|O) and mtDNA
accgctctgagctaaacctagccccaaacccactccaccttactaccagacaaccttagccaaaccatttacccaaataaagtataggcgatagaaattgaaacctggcgcaatagatat

SEQ ID NO: 68942 - DNA, 120 bp, Homo sapiens; identical to SEQ ID NO: 52175
  misc_feature: 806 for SV(C|O) and mtDNA

SEQ ID NO: 68943 - DNA, 120 bp, Homo sapiens
  misc_feature: 806 for SV(C|O) and mtDNA
aaggagatttgtagggagattagtatagagaggtagagtttttttcgtgatagtggttcactggataagtggcgttggcttgccatgattgtgaggggtaggagtcaggtagttagtatt

SEQ ID NO: 68944 - DNA, 120 bp, Homo sapiens
  misc_feature: 805 for SV(C|O) and mtDNA
gctaaacctagccccaaacccactccaccttactaccagacaaccttagccaaaccatttacccaaataaagtataggcgatagaaattgaaacctggcgcaatagatatagtaccgcaa

SEQ ID NO: 68945 - DNA, 120 bp, Homo sapiens
  misc_feature: 805 for SV(C|O) and mtDNA
ataaataataggatgaggcaggaatcaaagacagatactgcgacatagggtgctccggctccagcgtctcgcaatgctatcgcgtgcacaccccccagacgaaaataccaaatgcatgga

SEQ ID NO: 68946 - DNA, 120 bp, Homo sapiens
  misc_feature: 805 for SV(C|O) and mtDNA
tactatgtgctgttaagggtgagtaggtttgttggtatcctagtgggtgaggggtggctttggagttgcagttgatgtgtgatagttgagggttgattgctgtacttgcttgtaagcatg

SEQ ID NO: 68947 - DNA, 120 bp, Homo sapiens
  misc_feature: 805 for SV(C|O) and mtDNA
atgacgtgaagtccgtggaagcctgtggctacaaaaaatgttgagccgtagatgccgtcggaaatggtgaagggagactcgaagtactctgaggcttgtaggagggtaaaatagagaccc

SEQ ID NO: 68948 - DNA, 120 bp, Homo sapiens
  misc_feature: 805 for SV(C|O) and mtDNA
ctaagtctggcctatgagtgactacaaaaaggattagactgaaccgaattggtatatagtttaaacaaaacgaatgatttcgactcattaaattatgataatcatatttaccaaatgccc

SEQ ID NO: 68949 - DNA, 120 bp, Homo sapiens
  misc_feature: 805 for SV(C|O) and mtDNA
gaatctgacaacagaggcttacgaccccttatttaccgagaaagctcacaagaactgctaactcatgcccccatgtctaacaacatggctttctcaacttttaaaggataacagctatcc

SEQ ID NO: 68950 - DNA, 120 bp, Homo sapiens
  misc_feature: 805 for SV(C|O) and mtDNA
aatagatggagacatacagaaatagtcaaaccacgtctacaaaatgccagtatcaggcggcggcttcgaagccaaagtgatgtttggatgtaaagtgaaatattagttggcggatgaagc

SEQ ID NO: 68951 - DNA, 120 bp, Homo sapiens
  misc_feature: 805 for SV(C|O) and mtDNA
gctgtgaatgttataattaaggagatttgtagggagattagtatagagaggtagagtttttttcgtgatagtggttcactggataagtggcgttggcttgccatgattgtgaggggtagg

SEQ ID NO: 68952 - DNA, 120 bp, Homo sapiens
  misc_feature: 805 for SV(C|O) and mtDNA
ctatgtgctgttaagggtgagtaggtttgttggtatcctagtgggtgaggggtggctttggagttgcagttgatgtgtgatagttgagggttgattgctgtacttgcttgtaagcatggg

SEQ ID NO: 68953 - DNA, 120 bp, Homo sapiens; identical to SEQ ID NO: 55556
  misc_feature: 805 for SV(C|O) and mtDNA

SEQ ID NO: 68954 - DNA, 120 bp, Homo sapiens
  misc_feature: 805 for SV(C|O) and mtDNA
cctatccggaatgccccgacgttactcggactaccccgatgcatacaccacatgaaacatcctatcatctgtaggctcattcatttctctaacagcagtaatattaataattttcatgat

SEQ ID NO: 68955 - DNA, 120 bp, Homo sapiens
  misc_feature: 805 for SV(C|O) and mtDNA
attataccatagccgcctagttttaagagtactgcggcaagtactattgacccagcgatgggggcttcgacatgggctttagggagtcataagtggagtccgtaaagaggtatctttact

SEQ ID NO: 68956 - DNA, 120 bp, Homo sapiens; identical to SEQ ID NO: 55254
  misc_feature: 805 for SV(C|O) and mtDNA

SEQ ID NO: 68957 - DNA, 120 bp, Homo sapiens
  misc_feature: 804 for SV(C|O) and mtDNA
ttgaaacctggcgcaatagatatagtaccgcaagggaaagatgaaaaattataaccaagcataatacagcaaggactaacccctataccttctgcataatgaattaactagaaataactt

SEQ ID NO: 68958 - DNA, 120 bp, Homo sapiens
  misc_feature: 804 for SV(C|O) and mtDNA
tcaatagatggagacatacagaaatagtcaaaccacgtctacaaaatgccagtatcaggcggcggcttcgaagccaaagtgatgtttggatgtaaagtgaaatattagttggcggatgaa

SEQ ID NO: 68959 - DNA, 120 bp, Homo sapiens
  misc_feature: 804 for SV(C|O) and mtDNA
ttaatttattaatgcaaacagtacctaacaaacccacaggtcctaaactaccaaacctgcattaaaaatttcggttggggcgacctcggagcagaacccaacctccgagcagtacatgct

SEQ ID NO: 68960 - DNA, 120 bp, Homo sapiens
  misc_feature: 804 for SV(C|O) and mtDNA
cacacccaattggaccaatctatcaccctatagaagaactaatgttagtataagtaacatgaaaacattctcctccgcataagcctgcgtcagattaaaacactgaactgacaattaaca

SEQ ID NO: 68961 - DNA, 120 bp, Homo sapiens; identical to SEQ ID NO: 56897
  misc_feature: 804 for SV(C|O) and mtDNA

SEQ ID NO: 68962 - DNA, 120 bp, Homo sapiens
  misc_feature: 804 for SV(C|O) and mtDNA
tgcgatgagtaggggaagggagcctactagggtgtagaataggaagtatgtgcctgcgttcaggcgttctggctggttgcctcatcgggtgatgatagccaaggtggggataagtgtggt

SEQ ID NO: 68963 - DNA, 120 bp, Homo sapiens; identical to SEQ ID NO: 52104
  misc_feature: 804 for SV(C|O) and mtDNA

SEQ ID NO: 68964 - DNA, 120 bp, Homo sapiens; identical to SEQ ID NO: 56627
  misc_feature: 804 for SV(C|O) and mtDNA

SEQ ID NO: 68965 - DNA, 120 bp, Homo sapiens
  misc_feature: 804 for SV(C|O) and mtDNA
agcagataaggaaaatgattatgagggcgtgatcatgaaaggtgataagctcttctatgataggggaagtagcgtcttgtagacctacttgcgctgcatgtgccattaagatatatagga

SEQ ID NO: 68966 - DNA, 120 bp, Homo sapiens; identical to SEQ ID NO: 55859
  misc_feature: 804 for SV(C|O) and mtDNA

SEQ ID NO: 68967 - DNA, 120 bp, Homo sapiens
  misc_feature: 804 for SV(C|O) and mtDNA
gagtcgaaatcattcgttttgtttaaactatataccaattcggttcagtctaatcctttttgtagtcactcataggccagacttagggctaggatgatgattaataagagggatgacata

SEQ ID NO: 68968 - DNA, 120 bp, Homo sapiens
  misc_feature: 804 for SV(C|O) and mtDNA
tatgtactatgtgctgttaagggtgagtaggtttgttggtatcctagtgggtgaggggtggctttggagttgcagttgatgtgtgatagttgagggttgattgctgtacttgcttgtaag

SEQ ID NO: 68969 - DNA, 120 bp, Homo sapiens; identical to SEQ ID NO: 54287
  misc_feature: 804 for SV(C|O) and mtDNA

SEQ ID NO: 68970 - DNA, 120 bp, Homo sapiens
  misc_feature: 804 for SV(C|O) and mtDNA
gttggtcaagttattggatcaattgagtatagtagttcgctttgactggtgaagtcttagcatgtactgctcggaggttgggttctgctccgaggtcgccccaaccgaaatttttaatgc

SEQ ID NO: 68971 - DNA, 120 bp, Homo sapiens
  misc_feature: 804 for SV(C|O) and mtDNA
agtttgaacatacaaaacccaccccattcctccccacactcatcgcccttaccacgctactcctacctatctccccttttatactaataatcttatagaaatttaggttaaatacagacc

SEQ ID NO: 68972 - DNA, 120 bp, Homo sapiens
  misc_feature: 804 for SV(C|O) and mtDNA
gcagtaatgtacgaattacatagcggttgttgatgggtgagtcaatacttgggtggcacccaaatctgcttccccatgaaagaacagagaatagtttaaattagaatcttagctttgggt

SEQ ID NO: 68973 - DNA, 120 bp, Homo sapiens; identical to SEQ ID NO: 53467
  misc_feature: 804 for SV(C|O) and mtDNA

SEQ ID NO: 68974 - DNA, 120 bp, Homo sapiens
  misc_feature: 804 for SV(C|O) and mtDNA
attgtgaagatgataagtgtagagggaaggttaatggttgatattgctagggtggcgcttccaattaggtgcatgagtaggtggcctgcagtaatgttagcggttaggcgtacggccagg

SEQ ID NO: 68975 - DNA, 120 bp, Homo sapiens
  misc_feature: 804 for SV(C|O) and mtDNA
attggtcgtggttgtagtccgtgcgagaataatgatgtatgctttgtttctgttgagtgtgggtttagtaatggggtttgtggggttttcttctaagccttctcctatttatgggggttt

SEQ ID NO: 68976 - DNA, 120 bp, Homo sapiens; identical to SEQ ID NO: 53471
  misc_feature: 804 for SV(C|O) and mtDNA

SEQ ID NO: 68977 - DNA, 120 bp, Homo sapiens; identical to SEQ ID NO: 52081
  misc_feature: 804 for SV(C|O) and mtDNA

SEQ ID NO: 68978 - DNA, 120 bp, Homo sapiens
  misc_feature: 803 for SV(C|O) and mtDNA
tggcagtaatgtacgaattacatagcggttgttgatgggtgagtcaatacttgggtggcacccaaatctgcttccccatgaaagaacagagaatagtttaaattagaatcttagctttgg

SEQ ID NO: 68979 - DNA, 120 bp, Homo sapiens
  misc_feature: 803 for SV(C|O) and mtDNA
tgcaccatcgggatgtcctgatccaacatcgaggtcgtaaaccctattgttgatatggactctagaataggattgcgctgttatccctagggtaacttgttccgttggtcaagttattgg

SEQ ID NO: 68980 - DNA, 120 bp, Homo sapiens
  misc_feature: 803 for SV(C|O) and mtDNA
tgagctaaacctagccccaaacccactccaccttactaccagacaaccttagccaaaccatttacccaaataaagtataggcgatagaaattgaaacctggcgcaatagatatagtaccg

SEQ ID NO: 68981 - DNA, 120 bp, Homo sapiens
  misc_feature: 803 for SV(C|O) and mtDNA
gagtactgcggcaagtactattgacccagcgatgggggcttcgacatgggctttagggagtcataagtggagtccgtaaagaggtatctttactataaaagctattgtgtaagctagtca

SEQ ID NO: 68982 - DNA, 120 bp, Homo sapiens
  misc_feature: 803 for SV(C|O) and mtDNA
tcattggtgttcttgtagttgaaatacaacgatggtttttcatatcattggtcgtggttgtagtccgtgcgagaataatgatgtatgctttgtttctgttgagtgtgggtttagtaatgg

SEQ ID NO: 68983 - DNA, 120 bp, Homo sapiens
  misc_feature: 803 for SV(C|O) and mtDNA
aacccgtatacataaaatctagacaaaaaaggaaggaatcgaaccccccaaagctggtttcaagccaaccccatggcctccatgactttttcaaaaaggtattagaaaaaccatttcata

SEQ ID NO: 68984 - DNA, 120 bp, Homo sapiens
  misc_feature: 803 for SV(C|O) and mtDNA
taaacctagccccaaacccactccaccttactaccagacaaccttagccaaaccatttacccaaataaagtataggcgatagaaattgaaacctggcgcaatagatatagtaccgcaagg

SEQ ID NO: 68985 - DNA, 120 bp, Homo sapiens
  misc_feature: 803 for SV(C|O) and mtDNA
taaacccatataacctcccccaaaattcagaataataacacacccgaccacaccgctaacaatcaatactaaacccccataaataggagaaggcttagaagaaaaccccacaaaccccat

SEQ ID NO: 68986 - DNA, 120 bp, Homo sapiens; identical to SEQ ID NO: 56808
  misc_feature: 803 for SV(C|O) and mtDNA

SEQ ID NO: 68987 - DNA, 120 bp, Homo sapiens
  misc_feature: 803 for SV(C|O) and mtDNA
ctgagctaaacctagccccaaacccactccaccttactaccagacaaccttagccaaaccatttacccaaataaagtataggcgatagaaattgaaacctggcgcaatagatatagtacc

SEQ ID NO: 68988 - DNA, 120 bp, Homo sapiens; identical to SEQ ID NO: 54959
  misc_feature: 803 for SV(C|O) and mtDNA

SEQ ID NO: 68989 - DNA, 120 bp, Homo sapiens; identical to SEQ ID NO: 53573
  misc_feature: 803 for SV(C|O) and mtDNA

SEQ ID NO: 68990 - DNA, 120 bp, Homo sapiens
  misc_feature: 803 for SV(C|O) and mtDNA
acacccaattggaccaatctatcaccctatagaagaactaatgttagtataagtaacatgaaaacattctcctccgcataagcctgcgtcagattaaaacactgaactgacaattaacag

SEQ ID NO: 68991 - DNA, 120 bp, Homo sapiens
  misc_feature: 803 for SV(C|O) and mtDNA
ccatcgctaaccccactaaaacactcaccaagacctcaacccctgacccccatgcctcaggatactcctcaatagccatcgctgtagtatatccaaagacaaccatcattccccctaaat

SEQ ID NO: 68992 - DNA, 120 bp, Homo sapiens; identical to SEQ ID NO: 52561
  misc_feature: 803 for SV(C|O) and mtDNA

SEQ ID NO: 68993 - DNA, 120 bp, Homo sapiens; identical to SEQ ID NO: 51915
  misc_feature: 803 for SV(C|O) and mtDNA

SEQ ID NO: 68994 - DNA, 120 bp, Homo sapiens
  misc_feature: 803 for SV(C|O) and mtDNA
agtaggctcccttcccctactcatcgcactaatttacactcacaacaccctaggctcactaaacattctactactcactctcactgcccaagaactatcaaactcctgagccaacaactt

SEQ ID NO: 68995 - DNA, 120 bp, Homo sapiens
  misc_feature: 802 for SV(C|O) and mtDNA
ccacaaaccccattactaaacccacactcaacagaaacaaagcatacatcattattctcgcacggactacaaccacgaccaatgatatgaaaaaccatcgttgtatttcaactacaagaa

SEQ ID NO: 68996 - DNA, 120 bp, Homo sapiens; identical to SEQ ID NO: 56336
  misc_feature: 802 for SV(C|O) and mtDNA

SEQ ID NO: 68997 - DNA, 120 bp, Homo sapiens
  misc_feature: 802 for SV(C|O) and mtDNA
tgtacggtaaatggctttatgtactatgtgctgttaagggtgagtaggtttgttggtatcctagtgggtgaggggtggctttggagttgcagttgatgtgtgatagttgagggttgattg

SEQ ID NO: 68998 - DNA, 120 bp, Homo sapiens
  misc_feature: 802 for SV(C|O) and mtDNA
tggcgtaggtttggtctagggtgtagcctgagaataggggaaatcagtgaatgaagcctcctatgatggcaaatacagctcctattgataggacatagtggaagtgagctacaacgtagt

SEQ ID NO: 68999 - DNA, 120 bp, Homo sapiens
  misc_feature: 802 for SV(C|O) and mtDNA
taaggggatggccatggctaggtttatagatagttgggtggttggtgtaaatgagtgaggcaggagtccgaggaggttagttgtggcaataaaaatgattaaggatactagtataagaga

SEQ ID NO: 69000 - DNA, 120 bp, Homo sapiens; identical to SEQ ID NO: 57206
  misc_feature: 802 for SV(C|O) and mtDNA

SEQ ID NO: 69001 - DNA, 120 bp, Homo sapiens
  misc_feature: 802 for SV(C|O) and mtDNA
acaacaccctaggctcactaaacattctactactcactctcactgcccaagaactatcaaactcctgagccaacaacttaatatgactagcttacacaatagcttttatagtaaagatac

SEQ ID NO: 69002 - DNA, 120 bp, Homo sapiens; identical to SEQ ID NO: 56383
  misc_feature: 802 for SV(C|O) and mtDNA

SEQ ID NO: 69003 - DNA, 120 bp, Homo sapiens
  misc_feature: 802 for SV(C|O) and mtDNA
gatagtcagtagaattagaattgtgaagatgataagtgtagagggaaggttaatggttgatattgctagggtggcgcttccaattaggtgcatgagtaggtggcctgcagtaatgttagc

SEQ ID NO: 69004 - DNA, 120 bp, Homo sapiens
  misc_feature: 802 for SV(C|O) and mtDNA
gcagataaggaaaatgattatgagggcgtgatcatgaaaggtgataagctcttctatgataggggaagtagcgtcttgtagacctacttgcgctgcatgtgccattaagatatataggat

SEQ ID NO: 69005 - DNA, 120 bp, Homo sapiens
  misc_feature: 802 for SV(C|O) and mtDNA
cccaaagctggtttcaagccaaccccatggcctccatgactttttcaaaaaggtattagaaaaaccatttcataactttgtcaaagttaaattataggctaaatcctatatatcttaatg

SEQ ID NO: 69006 - DNA, 120 bp, Homo sapiens
  misc_feature: 802 for SV(C|O) and mtDNA
agtagttactggttgaacattgtttgttggtgtatatattgtaattgagattgctcgggggaataggttatgtgattaggagtagggttaggatgagtgggaagaagaaagagaggaagt

SEQ ID NO: 69007 - DNA, 120 bp, Homo sapiens
  misc_feature: 801 for SV(C|O) and mtDNA
tcgcttcgaagcgaaaagtcctaatagtagaagaaccctccataaacctggagtgactatatggatgccccccaccctaccacacattcgaagaacccgtatacataaaatctagacaaa

SEQ ID NO: 69008 - DNA, 120 bp, Homo sapiens; identical to SEQ ID NO: 54758
  misc_feature: 801 for SV(C|O) and mtDNA

SEQ ID NO: 69009 - DNA, 120 bp, Homo sapiens
  misc_feature: 801 for SV(C|O) and mtDNA
tggtagtttgtgtttaatatttttagttgggtgatgaggaatagtgtaaggagtatgggggtaattatggtgggccatacggtagtatttagttggggcatttcactgtaaagaggtgtt

SEQ ID NO: 69010 - DNA, 120 bp, Homo sapiens
  misc_feature: 801 for SV(C|O) and mtDNA
tgactatatggatgccccccaccctaccacacattcgaagaacccgtatacataaaatctagacaaaaaaggaaggaatcgaaccccccaaagctggtttcaagccaaccccatggcctc

SEQ ID NO: 69011 - DNA, 120 bp, Homo sapiens
  misc_feature: 801 for SV(C|O) and mtDNA
tgaaaatcacctcggagctggtaaaaagaggcctaacccctgtctttagatttacagtccaatgcttcactcagccattttacctcacccccactgatgttcgccgaccgttgactattc

SEQ ID NO: 69012 - DNA, 120 bp, Homo sapiens
  misc_feature: 801 for SV(C|O) and mtDNA
cccacaaaccccattactaaacccacactcaacagaaacaaagcatacatcattattctcgcacggactacaaccacgaccaatgatatgaaaaaccatcgttgtatttcaactacaaga

SEQ ID NO: 69013 - DNA, 120 bp, Homo sapiens
  misc_feature: 801 for SV(C|O) and mtDNA
aacctagccccaaacccactccaccttactaccagacaaccttagccaaaccatttacccaaataaagtataggcgatagaaattgaaacctggcgcaatagatatagtaccgcaaggga

SEQ ID NO: 69014 - DNA, 120 bp, Homo sapiens
  misc_feature: 801 for SV(C|O) and mtDNA
tatataccaattcggttcagtctaatcctttttgtagtcactcataggccagacttagggctaggatgatgattaataagagggatgacataactattagtggtaggttagttgtttgta

SEQ ID NO: 69015 - DNA, 120 bp, Homo sapiens
  misc_feature: 801 for SV(C|O) and mtDNA
tataccatagccgcctagttttaagagtactgcggcaagtactattgacccagcgatgggggcttcgacatgggctttagggagtcataagtggagtccgtaaagaggtatctttactat

SEQ ID NO: 69016 - DNA, 120 bp, Homo sapiens; identical to SEQ ID NO: 53464
  misc_feature: 801 for SV(C|O) and mtDNA

SEQ ID NO: 69017 - DNA, 120 bp, Homo sapiens
  misc_feature: 801 for SV(C|O) and mtDNA
taatattaataattttcatgatttgagaagccttcgcttcgaagcgaaaagtcctaatagtagaagaaccctccataaacctggagtgactatatggatgccccccaccctaccacacat

SEQ ID NO: 69018 - DNA, 120 bp, Homo sapiens; identical to SEQ ID NO: 57747
  misc_feature: 801 for SV(C|O) and mtDNA

SEQ ID NO: 69019 - DNA, 120 bp, Homo sapiens; identical to SEQ ID NO: 54197
  misc_feature: 801 for SV(C|O) and mtDNA

SEQ ID NO: 69020 - DNA, 120 bp, Homo sapiens
  misc_feature: 801 for SV(C|O) and mtDNA
gtgctgttaagggtgagtaggtttgttggtatcctagtgggtgaggggtggctttggagttgcagttgatgtgtgatagttgagggttgattgctgtacttgcttgtaagcatggggagg

SEQ ID NO: 69021 - DNA, 120 bp, Homo sapiens; identical to SEQ ID NO: 58632
  misc_feature: 801 for SV(C|O) and mtDNA

SEQ ID NO: 69022 - DNA, 120 bp, Homo sapiens
  misc_feature: 801 for SV(C|O) and mtDNA
gcgatgagtaggggaagggagcctactagggtgtagaataggaagtatgtgcctgcgttcaggcgttctggctggttgcctcatcgggtgatgatagccaaggtggggataagtgtggtt

SEQ ID NO: 69023 - DNA, 120 bp, Homo sapiens
  misc_feature: 801 for SV(C|O) and mtDNA
gatgtgtttaggagtgggacttctaggggatttagcggggtgatgcctgttgggggccagtgccctcctaattggggggtaggggctaggctggagtggtaaaaggctcagaaaaatcct

SEQ ID NO: 69024 - DNA, 120 bp, Homo sapiens; identical to SEQ ID NO: 52141
  misc_feature: 801 for SV(C|O) and mtDNA

SEQ ID NO: 69025 - DNA, 120 bp, Homo sapiens
  misc_feature: 801 for SV(C|O) and mtDNA
ccccacaaaccccattactaaacccacactcaacagaaacaaagcatacatcattattctcgcacggactacaaccacgaccaatgatatgaaaaaccatcgttgtatttcaactacaag

SEQ ID NO: 69026 - DNA, 120 bp, Homo sapiens; identical to SEQ ID NO: 53698
  misc_feature: 801 for SV(C|O) and mtDNA

SEQ ID NO: 69027 - DNA, 120 bp, Homo sapiens
  misc_feature: 801 for SV(C|O) and mtDNA
attgaaacctggcgcaatagatatagtaccgcaagggaaagatgaaaaattataaccaagcataatacagcaaggactaacccctataccttctgcataatgaattaactagaaataact

SEQ ID NO: 69028 - DNA, 120 bp, Homo sapiens; identical to SEQ ID NO: 53315
  misc_feature: 801 for SV(C|O) and mtDNA

SEQ ID NO: 69029 - DNA, 120 bp, Homo sapiens
  misc_feature: 801 for SV(C|O) and mtDNA
aacaccctaggctcactaaacattctactactcactctcactgcccaagaactatcaaactcctgagccaacaacttaatatgactagcttacacaatagcttttatagtaaagatacct

SEQ ID NO: 69030 - DNA, 120 bp, Homo sapiens
  misc_feature: 800 for SV(C|O) and mtDNA
tttaacacccatagtaggcctaaaagcagccaccaattaagaaagcgttcaagctcaacacccactacctaaaaaatcccaaacatataactgaactcctcacacccaattggaccaatc

SEQ ID NO: 69031 - DNA, 120 bp, Homo sapiens; identical to SEQ ID NO: 54277
  misc_feature: 800 for SV(C|O) and mtDNA

SEQ ID NO: 69032 - DNA, 120 bp, Homo sapiens
  misc_feature: 800 for SV(C|O) and mtDNA
ctcataaggggatggccatggctaggtttatagatagttgggtggttggtgtaaatgagtgaggcaggagtccgaggaggttagttgtggcaataaaaatgattaaggatactagtataa

SEQ ID NO: 69033 - DNA, 120 bp, Homo sapiens
  misc_feature: 800 for SV(C|O) and mtDNA
gtgaagtccgtggaagcctgtggctacaaaaaatgttgagccgtagatgccgtcggaaatggtgaagggagactcgaagtactctgaggcttgtaggagggtaaaatagagacccagtaa

SEQ ID NO: 69034 - DNA, 120 bp, Homo sapiens
  misc_feature: 800 for SV(C|O) and mtDNA
tcatcaacaaccgactaatcaccacccaacaatgactaatcaaactaacctcaaaacaaatgataaccatacacaacactaaaggacgaacctgatctcttatactagtatccttaatca

SEQ ID NO: 69035 - DNA, 120 bp, Homo sapiens
  misc_feature: 800 for SV(C|O) and mtDNA
tgaagatgataagtgtagagggaaggttaatggttgatattgctagggtggcgcttccaattaggtgcatgagtaggtggcctgcagtaatgttagcggttaggcgtacggccagggcta

SEQ ID NO: 69036 - DNA, 120 bp, Homo sapiens
  misc_feature: 800 for SV(C|O) and mtDNA
tcagtagaattagaattgtgaagatgataagtgtagagggaaggttaatggttgatattgctagggtggcgcttccaattaggtgcatgagtaggtggcctgcagtaatgttagcggtta

SEQ ID NO: 69037 - DNA, 120 bp, Homo sapiens
  misc_feature: 800 for SV(C|O) and mtDNA
agagttactttgatagagtaaataataggagcttaaacccccttatttctaggactatgagaatcgaacccatccctgagaatccaaaattctccgtgccacctatcacaccccatccta

SEQ ID NO: 69038 - DNA, 120 bp, Homo sapiens
  misc_feature: 800 for SV(C|O) and mtDNA
taatcaacaccctcctagccttactactaataattattacattttgactaccacaactcaacggctacatagaaaaatccaccccttacgagtgcggcttcgaccctatatcccccgccc

SEQ ID NO: 69039 - DNA, 120 bp, Homo sapiens; identical to SEQ ID NO: 52638
  misc_feature: 800 for SV(C|O) and mtDNA

SEQ ID NO: 69040 - DNA, 120 bp, Homo sapiens; identical to SEQ ID NO: 53303
  misc_feature: 800 for SV(C|O) and mtDNA

SEQ ID NO: 69041 - DNA, 120 bp, Homo sapiens
  misc_feature: 800 for SV(C|O) and mtDNA
caacaccctaggctcactaaacattctactactcactctcactgcccaagaactatcaaactcctgagccaacaacttaatatgactagcttacacaatagcttttatagtaaagatacc

SEQ ID NO: 69042 - DNA, 120 bp, Homo sapiens
  misc_feature: 800 for SV(C|O) and mtDNA
attaaacccatataacctcccccaaaattcagaataataacacacccgaccacaccgctaacaatcaatactaaacccccataaataggagaaggcttagaagaaaaccccacaaacccc

SEQ ID NO: 69043 - DNA, 120 bp, Homo sapiens; identical to SEQ ID NO: 53508
  misc_feature: 800 for SV(C|O) and mtDNA

SEQ ID NO: 69044 - DNA, 120 bp, Homo sapiens
  misc_feature: 800 for SV(C|O) and mtDNA
aatcaacaccctcctagccttactactaataattattacattttgactaccacaactcaacggctacatagaaaaatccaccccttacgagtgcggcttcgaccctatatcccccgcccg

SEQ ID NO: 69045 - DNA, 120 bp, Homo sapiens
  misc_feature: 800 for SV(C|O) and mtDNA
cattggtcgtggttgtagtccgtgcgagaataatgatgtatgctttgtttctgttgagtgtgggtttagtaatggggtttgtggggttttcttctaagccttctcctatttatgggggtt

SEQ ID NO: 69046 - DNA, 120 bp, Homo sapiens
  misc_feature: 800 for SV(C|O) and mtDNA
aagatgataagtgtagagggaaggttaatggttgatattgctagggtggcgcttccaattaggtgcatgagtaggtggcctgcagtaatgttagcggttaggcgtacggccagggctatt

SEQ ID NO: 69047 - DNA, 120 bp, Homo sapiens
  misc_feature: 799 for SV(C|O) and mtDNA
gaagtccgtggaagcctgtggctacaaaaaatgttgagccgtagatgccgtcggaaatggtgaagggagactcgaagtactctgaggcttgtaggagggtaaaatagagacccagtaaaa

SEQ ID NO: 69048 - DNA, 120 bp, Homo sapiens; identical to SEQ ID NO: 53582
  misc_feature: 799 for SV(C|O) and mtDNA

SEQ ID NO: 69049 - DNA, 120 bp, Homo sapiens
  misc_feature: 799 for SV(C|O) and mtDNA
ttaacacccatagtaggcctaaaagcagccaccaattaagaaagcgttcaagctcaacacccactacctaaaaaatcccaaacatataactgaactcctcacacccaattggaccaatct

SEQ ID NO: 69050 - DNA, 120 bp, Homo sapiens
  misc_feature: 799 for SV(C|O) and mtDNA
tgttgtgagtgtaaattagtgcgatgagtaggggaagggagcctactagggtgtagaataggaagtatgtgcctgcgttcaggcgttctggctggttgcctcatcgggtgatgatagcca

SEQ ID NO: 69051 - DNA, 120 bp, Homo sapiens
  misc_feature: 799 for SV(C|O) and mtDNA
tattataccatagccgcctagttttaagagtactgcggcaagtactattgacccagcgatgggggcttcgacatgggctttagggagtcataagtggagtccgtaaagaggtatctttac

SEQ ID NO: 69052 - DNA, 120 bp, Homo sapiens
  misc_feature: 799 for SV(C|O) and mtDNA
cctccatcgctaaccccactaaaacactcaccaagacctcaacccctgacccccatgcctcaggatactcctcaatagccatcgctgtagtatatccaaagacaaccatcattcccccta

SEQ ID NO: 69053 - DNA, 120 bp, Homo sapiens
  misc_feature: 799 for SV(C|O) and mtDNA
tagggcatttttaatcttagagcgaaagcctataatcactgcgcccgctcataaggggatggccatggctaggtttatagatagttgggtggttggtgtaaatgagtgaggcaggagtcc

SEQ ID NO: 69054 - DNA, 120 bp, Homo sapiens; identical to SEQ ID NO: 53485
  misc_feature: 799 for SV(C|O) and mtDNA

SEQ ID NO: 69055 - DNA, 120 bp, Homo sapiens
  misc_feature: 799 for SV(C|O) and mtDNA
ggcctatgagtgactacaaaaaggattagactgaaccgaattggtatatagtttaaacaaaacgaatgatttcgactcattaaattatgataatcatatttaccaaatgcccctcattta

SEQ ID NO: 69056 - DNA, 120 bp, Homo sapiens
  misc_feature: 799 for SV(C|O) and mtDNA
ggtggctttggagttgcagttgatgtgtgatagttgagggttgattgctgtacttgcttgtaagcatggggagggggttttgatgtggattgggtttttatgtactacaggtggtcaagt

SEQ ID NO: 69057 - DNA, 120 bp, Homo sapiens; identical to SEQ ID NO: 59022
  misc_feature: 799 for SV(C|O) and mtDNA

SEQ ID NO: 69058 - DNA, 120 bp, Homo sapiens
  misc_feature: 799 for SV(C|O) and mtDNA
aacagtgatagtattattccttctaggcatagtagggaggatatgaggtgtgagcggtatactagtattcctagaagtgagatggtaaatgctagtataatatttatgtaaatgaggggc

SEQ ID NO: 69059 - DNA, 120 bp, Homo sapiens
  misc_feature: 799 for SV(C|O) and mtDNA
ctcatcaacaaccgactaatcaccacccaacaatgactaatcaaactaacctcaaaacaaatgataaccatacacaacactaaaggacgaacctgatctcttatactagtatccttaatc

SEQ ID NO: 69060 - DNA, 120 bp, Homo sapiens
  misc_feature: 799 for SV(C|O) and mtDNA
gacagtttgaacatacaaaacccaccccattcctccccacactcatcgcccttaccacgctactcctacctatctccccttttatactaataatcttatagaaatttaggttaaatacag

SEQ ID NO: 69061 - DNA, 120 bp, Homo sapiens; identical to SEQ ID NO: 55974
  misc_feature: 799 for SV(C|O) and mtDNA

SEQ ID NO: 69062 - DNA, 120 bp, Homo sapiens
  misc_feature: 799 for SV(C|O) and mtDNA
ataaggggatggccatggctaggtttatagatagttgggtggttggtgtaaatgagtgaggcaggagtccgaggaggttagttgtggcaataaaaatgattaaggatactagtataagag

SEQ ID NO: 69063 - DNA, 120 bp, Homo sapiens; identical to SEQ ID NO: 56388
  misc_feature: 799 for SV(C|O) and mtDNA

SEQ ID NO: 69064 - DNA, 120 bp, Homo sapiens
  misc_feature: 799 for SV(C|O) and mtDNA
caagttattggatcaattgagtatagtagttcgctttgactggtgaagtcttagcatgtactgctcggaggttgggttctgctccgaggtcgccccaaccgaaatttttaatgcaggttt

SEQ ID NO: 69065 - DNA, 120 bp, Homo sapiens
  misc_feature: 799 for SV(C|O) and mtDNA
agccatgttgttagacatgggggcatgagttagcagttcttgtgagctttctcggtaaataaggggtcgtaagcctctgttgtcagattcacaatctgatgttttggttaaactatattt

SEQ ID NO: 69066 - DNA, 120 bp, Homo sapiens
  misc_feature: 798 for SV(C|O) and mtDNA
ggattttggcgtaggtttggtctagggtgtagcctgagaataggggaaatcagtgaatgaagcctcctatgatggcaaatacagctcctattgataggacatagtggaagtgagctacaa

SEQ ID NO: 69067 - DNA, 120 bp, Homo sapiens
  misc_feature: 798 for SV(C|O) and mtDNA
ttggtcgtggttgtagtccgtgcgagaataatgatgtatgctttgtttctgttgagtgtgggtttagtaatggggtttgtggggttttcttctaagccttctcctatttatgggggttta

SEQ ID NO: 69068 - DNA, 120 bp, Homo sapiens
  misc_feature: 798 for SV(C|O) and mtDNA
ttggcgtaggtttggtctagggtgtagcctgagaataggggaaatcagtgaatgaagcctcctatgatggcaaatacagctcctattgataggacatagtggaagtgagctacaacgtag

SEQ ID NO: 69069 - DNA, 120 bp, Homo sapiens
  misc_feature: 798 for SV(C|O) and mtDNA
acctagccccaaacccactccaccttactaccagacaaccttagccaaaccatttacccaaataaagtataggcgatagaaattgaaacctggcgcaatagatatagtaccgcaagggaa

SEQ ID NO: 69070 - DNA, 120 bp, Homo sapiens; identical to SEQ ID NO: 57005
  misc_feature: 798 for SV(C|O) and mtDNA

SEQ ID NO: 69071 - DNA, 120 bp, Homo sapiens
  misc_feature: 798 for SV(C|O) and mtDNA
gtttgaacatacaaaacccaccccattcctccccacactcatcgcccttaccacgctactcctacctatctccccttttatactaataatcttatagaaatttaggttaaatacagacca

SEQ ID NO: 69072 - DNA, 120 bp, Homo sapiens
  misc_feature: 798 for SV(C|O) and mtDNA
tggctggcagtaatgtacgaattacatagcggttgttgatgggtgagtcaatacttgggtggcacccaaatctgcttccccatgaaagaacagagaatagtttaaattagaatcttagct

SEQ ID NO: 69073 - DNA, 120 bp, Homo sapiens
  misc_feature: 798 for SV(C|O) and mtDNA
tctcatcaacaaccgactaatcaccacccaacaatgactaatcaaactaacctcaaaacaaatgataaccatacacaacactaaaggacgaacctgatctcttatactagtatccttaat

SEQ ID NO: 69074 - DNA, 120 bp, Homo sapiens
  misc_feature: 798 for SV(C|O) and mtDNA
acttgaccgctctgagctaaacctagccccaaacccactccaccttactaccagacaaccttagccaaaccatttacccaaataaagtataggcgatagaaattgaaacctggcgcaata

SEQ ID NO: 69075 - DNA, 120 bp, Homo sapiens
  misc_feature: 798 for SV(C|O) and mtDNA
tagtcagtagaattagaattgtgaagatgataagtgtagagggaaggttaatggttgatattgctagggtggcgcttccaattaggtgcatgagtaggtggcctgcagtaatgttagcgg

SEQ ID NO: 69076 - DNA, 120 bp, Homo sapiens
  misc_feature: 798 for SV(C|O) and mtDNA
tagtaggctcccttcccctactcatcgcactaatttacactcacaacaccctaggctcactaaacattctactactcactctcactgcccaagaactatcaaactcctgagccaacaact

SEQ ID NO: 69077 - DNA, 120 bp, Homo sapiens
  misc_feature: 798 for SV(C|O) and mtDNA
taggggatttagcggggtgatgcctgttgggggccagtgccctcctaattggggggtaggggctaggctggagtggtaaaaggctcagaaaaatcctgcgaagaaaaaaacttctgaggt

SEQ ID NO: 69078 - DNA, 120 bp, Homo sapiens
  misc_feature: 798 for SV(C|O) and mtDNA
taggaaaagggcatacaggactaggaagcagataaggaaaatgattatgagggcgtgatcatgaaaggtgataagctcttctatgataggggaagtagcgtcttgtagacctacttgcgc

SEQ ID NO: 69079 - DNA, 120 bp, Homo sapiens
  misc_feature: 798 for SV(C|O) and mtDNA
gtagttactggttgaacattgtttgttggtgtatatattgtaattgagattgctcgggggaataggttatgtgattaggagtagggttaggatgagtgggaagaagaaagagaggaagta

SEQ ID NO: 69080 - DNA, 120 bp, Homo sapiens
  misc_feature: 798 for SV(C|O) and mtDNA
aggggatttagcggggtgatgcctgttgggggccagtgccctcctaattggggggtaggggctaggctggagtggtaaaaggctcagaaaaatcctgcgaagaaaaaaacttctgaggta

SEQ ID NO: 69081 - DNA, 120 bp, Homo sapiens
  misc_feature: 798 for SV(C|O) and mtDNA
gtgttggcatctgctcgggcgtatcatcaactgatgagcaagaaggatataattcctacgccctctcagccgatgaacagttggaataggttgttagcggtaactaagattagtatggta

SEQ ID NO: 69082 - DNA, 120 bp, Homo sapiens
  misc_feature: 798 for SV(C|O) and mtDNA
aatattcatggtggctggcagtaatgtacgaattacatagcggttgttgatgggtgagtcaatacttgggtggcacccaaatctgcttccccatgaaagaacagagaatagtttaaatta

SEQ ID NO: 69083 - DNA, 120 bp, Homo sapiens; identical to SEQ ID NO: 53957
  misc_feature: 798 for SV(C|O) and mtDNA

SEQ ID NO: 69084 - DNA, 120 bp, Homo sapiens; identical to SEQ ID NO: 54292
  misc_feature: 798 for SV(C|O) and mtDNA

SEQ ID NO: 69085 - DNA, 120 bp, Homo sapiens
  misc_feature: 798 for SV(C|O) and mtDNA
gagtgactatatggatgccccccaccctaccacacattcgaagaacccgtatacataaaatctagacaaaaaaggaaggaatcgaaccccccaaagctggtttcaagccaaccccatggc

SEQ ID NO: 69086 - DNA, 120 bp, Homo sapiens
  misc_feature: 798 for SV(C|O) and mtDNA
gccagacttagggctaggatgatgattaataagagggatgacataactattagtggtaggttagttgtttgtagggctcatggtaggggtaaaaggagggcaatttctagatcaaataat

SEQ ID NO: 69087 - DNA, 120 bp, Homo sapiens
  misc_feature: 798 for SV(C|O) and mtDNA
cattactgccagccaccatgaatattgtacggtaccataaatacttgaccacctgtagtacataaaaacccaatccacatcaaaaccccctccccatgcttacaagcaagtacagcaatc

SEQ ID NO: 69088 - DNA, 120 bp, Homo sapiens
  misc_feature: 798 for SV(C|O) and mtDNA
agattattacaaatgcatgggctgtgacgataacgttgtagatgtggtcgttacctagaaggttgcctggctggcccagctcggctcgaataaggaggcttagagctgtgcctaggactc

SEQ ID NO: 69089 - DNA, 120 bp, Homo sapiens
  misc_feature: 798 for SV(C|O) and mtDNA
cttgaccgctctgagctaaacctagccccaaacccactccaccttactaccagacaaccttagccaaaccatttacccaaataaagtataggcgatagaaattgaaacctggcgcaatag

SEQ ID NO: 69090 - DNA, 120 bp, Homo sapiens; identical to SEQ ID NO: 55953
  misc_feature: 798 for SV(C|O) and mtDNA

SEQ ID NO: 69091 - DNA, 120 bp, Homo sapiens
  misc_feature: 798 for SV(C|O) and mtDNA
aaacctagccccaaacccactccaccttactaccagacaaccttagccaaaccatttacccaaataaagtataggcgatagaaattgaaacctggcgcaatagatatagtaccgcaaggg

SEQ ID NO: 69092 - DNA, 120 bp, Homo sapiens
  misc_feature: 798 for SV(C|O) and mtDNA
acaatattcatggtggctggcagtaatgtacgaattacatagcggttgttgatgggtgagtcaatacttgggtggcacccaaatctgcttccccatgaaagaacagagaatagtttaaat

SEQ ID NO: 69093 - DNA, 120 bp, Homo sapiens; identical to SEQ ID NO: 55794
  misc_feature: 798 for SV(C|O) and mtDNA

SEQ ID NO: 69094 - DNA, 120 bp, Homo sapiens
  misc_feature: 797 for SV(C|O) and mtDNA
ctccatcgctaaccccactaaaacactcaccaagacctcaacccctgacccccatgcctcaggatactcctcaatagccatcgctgtagtatatccaaagacaaccatcattccccctaa

SEQ ID NO: 69095 - DNA, 120 bp, Homo sapiens; identical to SEQ ID NO: 56162
  misc_feature: 797 for SV(C|O) and mtDNA

SEQ ID NO: 69096 - DNA, 120 bp, Homo sapiens
  misc_feature: 797 for SV(C|O) and mtDNA
atagatggagacatacagaaatagtcaaaccacgtctacaaaatgccagtatcaggcggcggcttcgaagccaaagtgatgtttggatgtaaagtgaaatattagttggcggatgaagca

SEQ ID NO: 69097 - DNA, 120 bp, Homo sapiens; identical to SEQ ID NO: 53825
  misc_feature: 797 for SV(C|O) and mtDNA

SEQ ID NO: 69098 - DNA, 120 bp, Homo sapiens
  misc_feature: 797 for SV(C|O) and mtDNA
ataagtgtagagggaaggttaatggttgatattgctagggtggcgcttccaattaggtgcatgagtaggtggcctgcagtaatgttagcggttaggcgtacggccagggctattggttga

SEQ ID NO: 69099 - DNA, 120 bp, Homo sapiens; identical to SEQ ID NO: 53014
  misc_feature: 797 for SV(C|O) and mtDNA

SEQ ID NO: 69100 - DNA, 120 bp, Homo sapiens
  misc_feature: 797 for SV(C|O) and mtDNA
gtattataccatagccgcctagttttaagagtactgcggcaagtactattgacccagcgatgggggcttcgacatgggctttagggagtcataagtggagtccgtaaagaggtatcttta

SEQ ID NO: 69101 - DNA, 120 bp, Homo sapiens
  misc_feature: 797 for SV(C|O) and mtDNA
gatggagacatacagaaatagtcaaaccacgtctacaaaatgccagtatcaggcggcggcttcgaagccaaagtgatgtttggatgtaaagtgaaatattagttggcggatgaagcagat

SEQ ID NO: 69102 - DNA, 120 bp, Homo sapiens
  misc_feature: 797 for SV(C|O) and mtDNA
gaagatgataagtgtagagggaaggttaatggttgatattgctagggtggcgcttccaattaggtgcatgagtaggtggcctgcagtaatgttagcggttaggcgtacggccagggctat

SEQ ID NO: 69103 - DNA, 120 bp, Homo sapiens
  misc_feature: 797 for SV(C|O) and mtDNA
gaacccgtatacataaaatctagacaaaaaaggaaggaatcgaaccccccaaagctggtttcaagccaaccccatggcctccatgactttttcaaaaaggtattagaaaaaccatttcat

SEQ ID NO: 69104 - DNA, 120 bp, Homo sapiens
  misc_feature: 797 for SV(C|O) and mtDNA
aattgtgaagatgataagtgtagagggaaggttaatggttgatattgctagggtggcgcttccaattaggtgcatgagtaggtggcctgcagtaatgttagcggttaggcgtacggccag

SEQ ID NO: 69105 - DNA, 120 bp, Homo sapiens
  misc_feature: 797 for SV(C|O) and mtDNA
agtgtagagggaaggttaatggttgatattgctagggtggcgcttccaattaggtgcatgagtaggtggcctgcagtaatgttagcggttaggcgtacggccagggctattggttgaatg

SEQ ID NO: 69106 - DNA, 120 bp, Homo sapiens; identical to SEQ ID NO: 52541
  misc_feature: 797 for SV(C|O) and mtDNA

SEQ ID NO: 69107 - DNA, 120 bp, Homo sapiens; identical to SEQ ID NO: 52051
  misc_feature: 797 for SV(C|O) and mtDNA

SEQ ID NO: 69108 - DNA, 120 bp, Homo sapiens; identical to SEQ ID NO: 56479
  misc_feature: 796 for SV(C|O) and mtDNA

SEQ ID NO: 69109 - DNA, 120 bp, Homo sapiens
  misc_feature: 796 for SV(C|O) and mtDNA
taggtgcgataaataataggatgaggcaggaatcaaagacagatactgcgacatagggtgctccggctccagcgtctcgcaatgctatcgcgtgcacaccccccagacgaaaataccaaa

SEQ ID NO: 69110 - DNA, 120 bp, Homo sapiens; identical to SEQ ID NO: 57430
  misc_feature: 796 for SV(C|O) and mtDNA

SEQ ID NO: 69111 - DNA, 120 bp, Homo sapiens
  misc_feature: 796 for SV(C|O) and mtDNA
agtcgaaatcattcgttttgtttaaactatataccaattcggttcagtctaatcctttttgtagtcactcataggccagacttagggctaggatgatgattaataagagggatgacataa

SEQ ID NO: 69112 - DNA, 120 bp, Homo sapiens
  misc_feature: 796 for SV(C|O) and mtDNA
ctcacacccaattggaccaatctatcaccctatagaagaactaatgttagtataagtaacatgaaaacattctcctccgcataagcctgcgtcagattaaaacactgaactgacaattaa

SEQ ID NO: 69113 - DNA, 120 bp, Homo sapiens
  misc_feature: 796 for SV(C|O) and mtDNA
tggtcaagttattggatcaattgagtatagtagttcgctttgactggtgaagtcttagcatgtactgctcggaggttgggttctgctccgaggtcgccccaaccgaaatttttaatgcag

SEQ ID NO: 69114 - DNA, 120 bp, Homo sapiens; identical to SEQ ID NO: 56793
  misc_feature: 796 for SV(C|O) and mtDNA

SEQ ID NO: 69115 - DNA, 120 bp, Homo sapiens
  misc_feature: 796 for SV(C|O) and mtDNA
tgattagtagtagttactggttgaacattgtttgttggtgtatatattgtaattgagattgctcgggggaataggttatgtgattaggagtagggttaggatgagtgggaagaagaaaga

SEQ ID NO: 69116 - DNA, 120 bp, Homo sapiens; identical to SEQ ID NO: 54815
  misc_feature: 796 for SV(C|O) and mtDNA

SEQ ID NO: 69117 - DNA, 120 bp, Homo sapiens
  misc_feature: 796 for SV(C|O) and mtDNA
acagtttgaacatacaaaacccaccccattcctccccacactcatcgcccttaccacgctactcctacctatctccccttttatactaataatcttatagaaatttaggttaaatacaga

SEQ ID NO: 69118 - DNA, 120 bp, Homo sapiens
  misc_feature: 796 for SV(C|O) and mtDNA
cctcacacccaattggaccaatctatcaccctatagaagaactaatgttagtataagtaacatgaaaacattctcctccgcataagcctgcgtcagattaaaacactgaactgacaatta

SEQ ID NO: 69119 - DNA, 120 bp, Homo sapiens
  misc_feature: 796 for SV(C|O) and mtDNA
gtgtttaggagtgggacttctaggggatttagcggggtgatgcctgttgggggccagtgccctcctaattggggggtaggggctaggctggagtggtaaaaggctcagaaaaatcctgcg

SEQ ID NO: 69120 - DNA, 120 bp, Homo sapiens; identical to SEQ ID NO: 56546
  misc_feature: 796 for SV(C|O) and mtDNA

SEQ ID NO: 69121 - DNA, 120 bp, Homo sapiens
  misc_feature: 796 for SV(C|O) and mtDNA
ggcagtaatgtacgaattacatagcggttgttgatgggtgagtcaatacttgggtggcacccaaatctgcttccccatgaaagaacagagaatagtttaaattagaatcttagctttggg

SEQ ID NO: 69122 - DNA, 120 bp, Homo sapiens
  misc_feature: 796 for SV(C|O) and mtDNA
atgtactatgtgctgttaagggtgagtaggtttgttggtatcctagtgggtgaggggtggctttggagttgcagttgatgtgtgatagttgagggttgattgctgtacttgcttgtaagc

SEQ ID NO: 69123 - DNA, 120 bp, Homo sapiens
  misc_feature: 796 for SV(C|O) and mtDNA
gctggcagtaatgtacgaattacatagcggttgttgatgggtgagtcaatacttgggtggcacccaaatctgcttccccatgaaagaacagagaatagtttaaattagaatcttagcttt

SEQ ID NO: 69124 - DNA, 120 bp, Homo sapiens
  misc_feature: 796 for SV(C|O) and mtDNA
agtagaattagaattgtgaagatgataagtgtagagggaaggttaatggttgatattgctagggtggcgcttccaattaggtgcatgagtaggtggcctgcagtaatgttagcggttagg

SEQ ID NO: 69125 - DNA, 120 bp, Homo sapiens
  misc_feature: 796 for SV(C|O) and mtDNA
acacccgaccacaccgctaacaatcaatactaaacccccataaataggagaaggcttagaagaaaaccccacaaaccccattactaaacccacactcaacagaaacaaagcatacatcat

SEQ ID NO: 69126 - DNA, 120 bp, Homo sapiens
  misc_feature: 795 for SV(C|O) and mtDNA
tgaagtccgtggaagcctgtggctacaaaaaatgttgagccgtagatgccgtcggaaatggtgaagggagactcgaagtactctgaggcttgtaggagggtaaaatagagacccagtaaa

SEQ ID NO: 69127 - DNA, 120 bp, Homo sapiens
  misc_feature: 795 for SV(C|O) and mtDNA
accccacaaaccccattactaaacccacactcaacagaaacaaagcatacatcattattctcgcacggactacaaccacgaccaatgatatgaaaaaccatcgttgtatttcaactacaa

SEQ ID NO: 69128 - DNA, 120 bp, Homo sapiens
  misc_feature: 795 for SV(C|O) and mtDNA
cagacttagggctaggatgatgattaataagagggatgacataactattagtggtaggttagttgtttgtagggctcatggtaggggtaaaaggagggcaatttctagatcaaataataa

SEQ ID NO: 69129 - DNA, 120 bp, Homo sapiens
  misc_feature: 795 for SV(C|O) and mtDNA
ttattacaaatgcatgggctgtgacgataacgttgtagatgtggtcgttacctagaaggttgcctggctggcccagctcggctcgaataaggaggcttagagctgtgcctaggactccag

SEQ ID NO: 69130 - DNA, 120 bp, Homo sapiens
  misc_feature: 795 for SV(C|O) and mtDNA
ggggatttagcggggtgatgcctgttgggggccagtgccctcctaattggggggtaggggctaggctggagtggtaaaaggctcagaaaaatcctgcgaagaaaaaaacttctgaggtaa

SEQ ID NO: 69131 - DNA, 120 bp, Homo sapiens
  misc_feature: 795 for SV(C|O) and mtDNA
tggattttggcgtaggtttggtctagggtgtagcctgagaataggggaaatcagtgaatgaagcctcctatgatggcaaatacagctcctattgataggacatagtggaagtgagctaca

SEQ ID NO: 69132 - DNA, 120 bp, Homo sapiens
  misc_feature: 795 for SV(C|O) and mtDNA
tcattggtcgtggttgtagtccgtgcgagaataatgatgtatgctttgtttctgttgagtgtgggtttagtaatggggtttgtggggttttcttctaagccttctcctatttatgggggt

SEQ ID NO: 69133 - DNA, 120 bp, Homo sapiens
  misc_feature: 795 for SV(C|O) and mtDNA
tcacacccaattggaccaatctatcaccctatagaagaactaatgttagtataagtaacatgaaaacattctcctccgcataagcctgcgtcagattaaaacactgaactgacaattaac

SEQ ID NO: 69134 - DNA, 120 bp, Homo sapiens
  misc_feature: 795 for SV(C|O) and mtDNA
tatccggaatgccccgacgttactcggactaccccgatgcatacaccacatgaaacatcctatcatctgtaggctcattcatttctctaacagcagtaatattaataattttcatgattt

SEQ ID NO: 69135 - DNA, 120 bp, Homo sapiens
  misc_feature: 795 for SV(C|O) and mtDNA
tagaattgtgaagatgataagtgtagagggaaggttaatggttgatattgctagggtggcgcttccaattaggtgcatgagtaggtggcctgcagtaatgttagcggttaggcgtacggc

SEQ ID NO: 69136 - DNA, 120 bp, Homo sapiens; identical to SEQ ID NO: 56315
  misc_feature: 795 for SV(C|O) and mtDNA

SEQ ID NO: 69137 - DNA, 120 bp, Homo sapiens
  misc_feature: 795 for SV(C|O) and mtDNA
aggagatttgtagggagattagtatagagaggtagagtttttttcgtgatagtggttcactggataagtggcgttggcttgccatgattgtgaggggtaggagtcaggtagttagtatta

SEQ ID NO: 69138 - DNA, 120 bp, Homo sapiens
  misc_feature: 795 for SV(C|O) and mtDNA
cagtttgaacatacaaaacccaccccattcctccccacactcatcgcccttaccacgctactcctacctatctccccttttatactaataatcttatagaaatttaggttaaatacagac

SEQ ID NO: 69139 - DNA, 120 bp, Homo sapiens
  misc_feature: 795 for SV(C|O) and mtDNA
ggggcctaagaccaatggatagctgttatcctttaaaagttgagaaagccatgttgttagacatgggggcatgagttagcagttcttgtgagctttctcggtaaataaggggtcgtaagc

SEQ ID NO: 69140 - DNA, 120 bp, Homo sapiens
  misc_feature: 795 for SV(C|O) and mtDNA
ggctttggtgagggaggtaggtggtagtttgtgtttaatatttttagttgggtgatgaggaatagtgtaaggagtatgggggtaattatggtgggccatacggtagtatttagttggggc

SEQ ID NO: 69141 - DNA, 120 bp, Homo sapiens
  misc_feature: 795 for SV(C|O) and mtDNA
ggctggcagtaatgtacgaattacatagcggttgttgatgggtgagtcaatacttgggtggcacccaaatctgcttccccatgaaagaacagagaatagtttaaattagaatcttagctt

SEQ ID NO: 69142 - DNA, 120 bp, Homo sapiens
  misc_feature: 795 for SV(C|O) and mtDNA
ggatagtcagtagaattagaattgtgaagatgataagtgtagagggaaggttaatggttgatattgctagggtggcgcttccaattaggtgcatgagtaggtggcctgcagtaatgttag

SEQ ID NO: 69143 - DNA, 120 bp, Homo sapiens; identical to SEQ ID NO: 54177
  misc_feature: 795 for SV(C|O) and mtDNA

SEQ ID NO: 69144 - DNA, 120 bp, Homo sapiens
  misc_feature: 795 for SV(C|O) and mtDNA
atttttaatcttagagcgaaagcctataatcactgcgcccgctcataaggggatggccatggctaggtttatagatagttgggtggttggtgtaaatgagtgaggcaggagtccgaggag

SEQ ID NO: 69145 - DNA, 120 bp, Homo sapiens
  misc_feature: 795 for SV(C|O) and mtDNA
attgtcagttcagtgttttaatctgacgcaggcttatgcggaggagaatgttttcatgttacttatactaacattagttcttctatagggtgatagattggtccaattgggtgtgaggag

SEQ ID NO: 69146 - DNA, 120 bp, Homo sapiens
  misc_feature: 795 for SV(C|O) and mtDNA
cgtggttgtagtccgtgcgagaataatgatgtatgctttgtttctgttgagtgtgggtttagtaatggggtttgtggggttttcttctaagccttctcctatttatgggggtttagtatt

SEQ ID NO: 69147 - DNA, 120 bp, Homo sapiens
  misc_feature: 795 for SV(C|O) and mtDNA
ataggtatagtgttccaatgtctttgtggtttgtagagaatagtcaacggtcggcgaacatcagtgggggtgaggtaaaatggctgagtgaagcattggactgtaaatctaaagacaggg

SEQ ID NO: 69148 - DNA, 120 bp, Homo sapiens
  misc_feature: 795 for SV(C|O) and mtDNA
caatattcatggtggctggcagtaatgtacgaattacatagcggttgttgatgggtgagtcaatacttgggtggcacccaaatctgcttccccatgaaagaacagagaatagtttaaatt

SEQ ID NO: 69149 - DNA, 120 bp, Homo sapiens
  misc_feature: 795 for SV(C|O) and mtDNA
atccggaatgccccgacgttactcggactaccccgatgcatacaccacatgaaacatcctatcatctgtaggctcattcatttctctaacagcagtaatattaataattttcatgatttg

SEQ ID NO: 69150 - DNA, 120 bp, Homo sapiens
  misc_feature: 795 for SV(C|O) and mtDNA
agttcagtgttttaatctgacgcaggcttatgcggaggagaatgttttcatgttacttatactaacattagttcttctatagggtgatagattggtccaattgggtgtgaggagttcagt

SEQ ID NO: 69151 - DNA, 120 bp, Homo sapiens
  misc_feature: 794 for SV(C|O) and mtDNA
ttgtgaagatgataagtgtagagggaaggttaatggttgatattgctagggtggcgcttccaattaggtgcatgagtaggtggcctgcagtaatgttagcggttaggcgtacggccaggg

SEQ ID NO: 69152 - DNA, 120 bp, Homo sapiens
  misc_feature: 794 for SV(C|O) and mtDNA
tgtgaagatgataagtgtagagggaaggttaatggttgatattgctagggtggcgcttccaattaggtgcatgagtaggtggcctgcagtaatgttagcggttaggcgtacggccagggc

SEQ ID NO: 69153 - DNA, 120 bp, Homo sapiens
  misc_feature: 794 for SV(C|O) and mtDNA
aaccccacaaaccccattactaaacccacactcaacagaaacaaagcatacatcattattctcgcacggactacaaccacgaccaatgatatgaaaaaccatcgttgtatttcaactaca

SEQ ID NO: 69154 - DNA, 120 bp, Homo sapiens
  misc_feature: 794 for SV(C|O) and mtDNA
aatctgacaacagaggcttacgaccccttatttaccgagaaagctcacaagaactgctaactcatgcccccatgtctaacaacatggctttctcaacttttaaaggataacagctatcca

SEQ ID NO: 69155 - DNA, 120 bp, Homo sapiens
  misc_feature: 794 for SV(C|O) and mtDNA
aaagctggtttcaagccaaccccatggcctccatgactttttcaaaaaggtattagaaaaaccatttcataactttgtcaaagttaaattataggctaaatcctatatatcttaatggca

SEQ ID NO: 69156 - DNA, 120 bp, Homo sapiens
  misc_feature: 794 for SV(C|O) and mtDNA
ataggatgtttcatgtggtgtatgcatcggggtagtccgagtaacgtcggggcattccggataggccgagaaagtgttgtgggaagaaagttagatttacgccgatgaatatgatagtga

SEQ ID NO: 69157 - DNA, 120 bp, Homo sapiens
  misc_feature: 794 for SV(C|O) and mtDNA
catcgctaaccccactaaaacactcaccaagacctcaacccctgacccccatgcctcaggatactcctcaatagccatcgctgtagtatatccaaagacaaccatcattccccctaaata

SEQ ID NO: 69158 - DNA, 120 bp, Homo sapiens
  misc_feature: 794 for SV(C|O) and mtDNA
ccagacttagggctaggatgatgattaataagagggatgacataactattagtggtaggttagttgtttgtagggctcatggtaggggtaaaaggagggcaatttctagatcaaataata

SEQ ID NO: 69159 - DNA, 120 bp, Homo sapiens
  misc_feature: 794 for SV(C|O) and mtDNA
tagatggagacatacagaaatagtcaaaccacgtctacaaaatgccagtatcaggcggcggcttcgaagccaaagtgatgtttggatgtaaagtgaaatattagttggcggatgaagcag

SEQ ID NO: 69160 - DNA, 120 bp, Homo sapiens; identical to SEQ ID NO: 55941
  misc_feature: 794 for SV(C|O) and mtDNA

SEQ ID NO: 69161 - DNA, 120 bp, Homo sapiens
  misc_feature: 794 for SV(C|O) and mtDNA
taaggagatttgtagggagattagtatagagaggtagagtttttttcgtgatagtggttcactggataagtggcgttggcttgccatgattgtgaggggtaggagtcaggtagttagtat

SEQ ID NO: 69162 - DNA, 120 bp, Homo sapiens
  misc_feature: 794 for SV(C|O) and mtDNA
gccatgttgttagacatgggggcatgagttagcagttcttgtgagctttctcggtaaataaggggtcgtaagcctctgttgtcagattcacaatctgatgttttggttaaactatattta

SEQ ID NO: 69163 - DNA, 120 bp, Homo sapiens; identical to SEQ ID NO: 56348
  misc_feature: 794 for SV(C|O) and mtDNA

SEQ ID NO: 69164 - DNA, 120 bp, Homo sapiens
  misc_feature: 794 for SV(C|O) and mtDNA
gggctttggtgagggaggtaggtggtagtttgtgtttaatatttttagttgggtgatgaggaatagtgtaaggagtatgggggtaattatggtgggccatacggtagtatttagttgggg

SEQ ID NO: 69165 - DNA, 120 bp, Homo sapiens
  misc_feature: 794 for SV(C|O) and mtDNA
cacccaattggaccaatctatcaccctatagaagaactaatgttagtataagtaacatgaaaacattctcctccgcataagcctgcgtcagattaaaacactgaactgacaattaacagc

SEQ ID NO: 69166 - DNA, 120 bp, Homo sapiens; identical to SEQ ID NO: 53879
  misc_feature: 794 for SV(C|O) and mtDNA

SEQ ID NO: 69167 - DNA, 120 bp, Homo sapiens
  misc_feature: 794 for SV(C|O) and mtDNA
gataagtgtagagggaaggttaatggttgatattgctagggtggcgcttccaattaggtgcatgagtaggtggcctgcagtaatgttagcggttaggcgtacggccagggctattggttg

SEQ ID NO: 69168 - DNA, 120 bp, Homo sapiens
  misc_feature: 794 for SV(C|O) and mtDNA
aaaatcacctcggagctggtaaaaagaggcctaacccctgtctttagatttacagtccaatgcttcactcagccattttacctcacccccactgatgttcgccgaccgttgactattctc

SEQ ID NO: 69169 - DNA, 120 bp, Homo sapiens
  misc_feature: 794 for SV(C|O) and mtDNA
cgaatttgcaattcaatatgaaaatcacctcggagctggtaaaaagaggcctaacccctgtctttagatttacagtccaatgcttcactcagccattttacctcacccccactgatgttc

SEQ ID NO: 69170 - DNA, 120 bp, Homo sapiens
  misc_feature: 794 for SV(C|O) and mtDNA
cgtattataccatagccgcctagttttaagagtactgcggcaagtactattgacccagcgatgggggcttcgacatgggctttagggagtcataagtggagtccgtaaagaggtatcttt

SEQ ID NO: 69171 - DNA, 120 bp, Homo sapiens; identical to SEQ ID NO: 54743
  misc_feature: 794 for SV(C|O) and mtDNA

SEQ ID NO: 69172 - DNA, 120 bp, Homo sapiens
  misc_feature: 794 for SV(C|O) and mtDNA
cattaatcagttcttcaaatatctactcatcttcctaattaccatactaatcttagttaccgctaacaacctattccaactgttcatcggctgagagggcgtaggaattatatccttctt

SEQ ID NO: 69173 - DNA, 120 bp, Homo sapiens
  misc_feature: 794 for SV(C|O) and mtDNA
atgtacggtaaatggctttatgtactatgtgctgttaagggtgagtaggtttgttggtatcctagtgggtgaggggtggctttggagttgcagttgatgtgtgatagttgagggttgatt

SEQ ID NO: 69174 - DNA, 120 bp, Homo sapiens
  misc_feature: 794 for SV(C|O) and mtDNA
acctccatcgctaaccccactaaaacactcaccaagacctcaacccctgacccccatgcctcaggatactcctcaatagccatcgctgtagtatatccaaagacaaccatcattccccct

SEQ ID NO: 69175 - DNA, 120 bp, Homo sapiens; identical to SEQ ID NO: 55108
  misc_feature: 794 for SV(C|O) and mtDNA

SEQ ID NO: 69176 - DNA, 120 bp, Homo sapiens
  misc_feature: 793 for SV(C|O) and mtDNA
tacaatattcatggtggctggcagtaatgtacgaattacatagcggttgttgatgggtgagtcaatacttgggtggcacccaaatctgcttccccatgaaagaacagagaatagtttaaa

SEQ ID NO: 69177 - DNA, 120 bp, Homo sapiens
  misc_feature: 793 for SV(C|O) and mtDNA
tgttggcatctgctcgggcgtatcatcaactgatgagcaagaaggatataattcctacgccctctcagccgatgaacagttggaataggttgttagcggtaactaagattagtatggtaa

SEQ ID NO: 69178 - DNA, 120 bp, Homo sapiens
  misc_feature: 793 for SV(C|O) and mtDNA
ttaatgagtcgaaatcattcgttttgtttaaactatataccaattcggttcagtctaatcctttttgtagtcactcataggccagacttagggctaggatgatgattaataagagggatg

SEQ ID NO: 69179 - DNA, 120 bp, Homo sapiens
  misc_feature: 793 for SV(C|O) and mtDNA
tgtttaggagtgggacttctaggggatttagcggggtgatgcctgttgggggccagtgccctcctaattggggggtaggggctaggctggagtggtaaaaggctcagaaaaatcctgcga

SEQ ID NO: 69180 - DNA, 120 bp, Homo sapiens
  misc_feature: 793 for SV(C|O) and mtDNA
tgtactatgtgctgttaagggtgagtaggtttgttggtatcctagtgggtgaggggtggctttggagttgcagttgatgtgtgatagttgagggttgattgctgtacttgcttgtaagca

SEQ ID NO: 69181 - DNA, 120 bp, Homo sapiens; identical to SEQ ID NO: 52515
  misc_feature: 793 for SV(C|O) and mtDNA

SEQ ID NO: 69182 - DNA, 120 bp, Homo sapiens
  misc_feature: 793 for SV(C|O) and mtDNA
tggtcgtggttgtagtccgtgcgagaataatgatgtatgctttgtttctgttgagtgtgggtttagtaatggggtttgtggggttttcttctaagccttctcctatttatgggggtttag

SEQ ID NO: 69183 - DNA, 120 bp, Homo sapiens
  misc_feature: 793 for SV(C|O) and mtDNA
tggggcctaagaccaatggatagctgttatcctttaaaagttgagaaagccatgttgttagacatgggggcatgagttagcagttcttgtgagctttctcggtaaataaggggtcgtaag

SEQ ID NO: 69184 - DNA, 120 bp, Homo sapiens
  misc_feature: 793 for SV(C|O) and mtDNA
tgataagtgtagagggaaggttaatggttgatattgctagggtggcgcttccaattaggtgcatgagtaggtggcctgcagtaatgttagcggttaggcgtacggccagggctattggtt

SEQ ID NO: 69185 - DNA, 120 bp, Homo sapiens
  misc_feature: 793 for SV(C|O) and mtDNA
gggcatttttaatcttagagcgaaagcctataatcactgcgcccgctcataaggggatggccatggctaggtttatagatagttgggtggttggtgtaaatgagtgaggcaggagtccga

SEQ ID NO: 69186 - DNA, 120 bp, Homo sapiens
  misc_feature: 793 for SV(C|O) and mtDNA
agagggatgatgctaataattaggctgtgggtggttgtgttgattcaaattatgtgttttttggaaagtcatgtcagtggtagtaatataattgttgggacgattagttttagcattgga

SEQ ID NO: 69187 - DNA, 120 bp, Homo sapiens
  misc_feature: 793 for SV(C|O) and mtDNA
tcaagttattggatcaattgagtatagtagttcgctttgactggtgaagtcttagcatgtactgctcggaggttgggttctgctccgaggtcgccccaaccgaaatttttaatgcaggtt

SEQ ID NO: 69188 - DNA, 120 bp, Homo sapiens
  misc_feature: 793 for SV(C|O) and mtDNA
taaactttacttcctctctttcttcttcccactcatcctaaccctactcctaatcacataacctattcccccgagcaatctcaattacaatatatacaccaacaaacaatgttcaaccag

SEQ ID NO: 69189 - DNA, 120 bp, Homo sapiens; identical to SEQ ID NO: 52157
  misc_feature: 793 for SV(C|O) and mtDNA

SEQ ID NO: 69190 - DNA, 120 bp, Homo sapiens
  misc_feature: 793 for SV(C|O) and mtDNA
gtgaagatgataagtgtagagggaaggttaatggttgatattgctagggtggcgcttccaattaggtgcatgagtaggtggcctgcagtaatgttagcggttaggcgtacggccagggct

SEQ ID NO: 69191 - DNA, 120 bp, Homo sapiens; identical to SEQ ID NO: 56019
  misc_feature: 793 for SV(C|O) and mtDNA

SEQ ID NO: 69192 - DNA, 120 bp, Homo sapiens
  misc_feature: 793 for SV(C|O) and mtDNA
ggtagtttgtgtttaatatttttagttgggtgatgaggaatagtgtaaggagtatgggggtaattatggtgggccatacggtagtatttagttggggcatttcactgtaaagaggtgttg

SEQ ID NO: 69193 - DNA, 120 bp, Homo sapiens
  misc_feature: 793 for SV(C|O) and mtDNA
gactatatggatgccccccaccctaccacacattcgaagaacccgtatacataaaatctagacaaaaaaggaaggaatcgaaccccccaaagctggtttcaagccaaccccatggcctcc

SEQ ID NO: 69194 - DNA, 120 bp, Homo sapiens; identical to SEQ ID NO: 55429
  misc_feature: 793 for SV(C|O) and mtDNA

SEQ ID NO: 69195 - DNA, 120 bp, Homo sapiens
  misc_feature: 793 for SV(C|O) and mtDNA
gatgataagtgtagagggaaggttaatggttgatattgctagggtggcgcttccaattaggtgcatgagtaggtggcctgcagtaatgttagcggttaggcgtacggccagggctattgg

SEQ ID NO: 69196 - DNA, 120 bp, Homo sapiens
  misc_feature: 793 for SV(C|O) and mtDNA
caatagatggagacatacagaaatagtcaaaccacgtctacaaaatgccagtatcaggcggcggcttcgaagccaaagtgatgtttggatgtaaagtgaaatattagttggcggatgaag

SEQ ID NO: 69197 - DNA, 120 bp, Homo sapiens
  misc_feature: 793 for SV(C|O) and mtDNA
agacttagggctaggatgatgattaataagagggatgacataactattagtggtaggttagttgtttgtagggctcatggtaggggtaaaaggagggcaatttctagatcaaataataag

SEQ ID NO: 69198 - DNA, 120 bp, Homo sapiens
  misc_feature: 793 for SV(C|O) and mtDNA
atagtcagtagaattagaattgtgaagatgataagtgtagagggaaggttaatggttgatattgctagggtggcgcttccaattaggtgcatgagtaggtggcctgcagtaatgttagcg

SEQ ID NO: 69199 - DNA, 120 bp, Homo sapiens
  misc_feature: 793 for SV(C|O) and mtDNA
atcattggtcgtggttgtagtccgtgcgagaataatgatgtatgctttgtttctgttgagtgtgggtttagtaatggggtttgtggggttttcttctaagccttctcctatttatggggg

SEQ ID NO: 69200 - DNA, 120 bp, Homo sapiens; identical to SEQ ID NO: 52508
  misc_feature: 793 for SV(C|O) and mtDNA

SEQ ID NO: 69201 - DNA, 120 bp, Homo sapiens
  misc_feature: 793 for SV(C|O) and mtDNA
atgataagtgtagagggaaggttaatggttgatattgctagggtggcgcttccaattaggtgcatgagtaggtggcctgcagtaatgttagcggttaggcgtacggccagggctattggt

SEQ ID NO: 69202 - DNA, 120 bp, Homo sapiens
  misc_feature: 793 for SV(C|O) and mtDNA
aagagttactttgatagagtaaataataggagcttaaacccccttatttctaggactatgagaatcgaacccatccctgagaatccaaaattctccgtgccacctatcacaccccatcct

SEQ ID NO: 69203 - DNA, 120 bp, Homo sapiens
  misc_feature: 792 for SV(C|O) and mtDNA
tttgaacatacaaaacccaccccattcctccccacactcatcgcccttaccacgctactcctacctatctccccttttatactaataatcttatagaaatttaggttaaatacagaccaa

SEQ ID NO: 69204 - DNA, 120 bp, Homo sapiens
  misc_feature: 792 for SV(C|O) and mtDNA
tttaatgagtcgaaatcattcgttttgtttaaactatataccaattcggttcagtctaatcctttttgtagtcactcataggccagacttagggctaggatgatgattaataagagggat

SEQ ID NO: 69205 - DNA, 120 bp, Homo sapiens
  misc_feature: 792 for SV(C|O) and mtDNA
ttgtcagttcagtgttttaatctgacgcaggcttatgcggaggagaatgttttcatgttacttatactaacattagttcttctatagggtgatagattggtccaattgggtgtgaggagt

SEQ ID NO: 69206 - DNA, 120 bp, Homo sapiens
  misc_feature: 792 for SV(C|O) and mtDNA
ttggggcctaagaccaatggatagctgttatcctttaaaagttgagaaagccatgttgttagacatgggggcatgagttagcagttcttgtgagctttctcggtaaataaggggtcgtaa

SEQ ID NO: 69207 - DNA, 120 bp, Homo sapiens
  misc_feature: 792 for SV(C|O) and mtDNA
ttataccatagccgcctagttttaagagtactgcggcaagtactattgacccagcgatgggggcttcgacatgggctttagggagtcataagtggagtccgtaaagaggtatctttacta

SEQ ID NO: 69208 - DNA, 120 bp, Homo sapiens
  misc_feature: 792 for SV(C|O) and mtDNA
atctcatcaacaaccgactaatcaccacccaacaatgactaatcaaactaacctcaaaacaaatgataaccatacacaacactaaaggacgaacctgatctcttatactagtatccttaa

SEQ ID NO: 69209 - DNA, 120 bp, Homo sapiens
  misc_feature: 792 for SV(C|O) and mtDNA
ttaaacccatataacctcccccaaaattcagaataataacacacccgaccacaccgctaacaatcaatactaaacccccataaataggagaaggcttagaagaaaaccccacaaacccca

SEQ ID NO: 69210 - DNA, 120 bp, Homo sapiens
  misc_feature: 792 for SV(C|O) and mtDNA
ggttgagaatgagtgtgaggcgtattataccatagccgcctagttttaagagtactgcggcaagtactattgacccagcgatgggggcttcgacatgggctttagggagtcataagtgga

SEQ ID NO: 69211 - DNA, 120 bp, Homo sapiens
  misc_feature: 792 for SV(C|O) and mtDNA
aaaaccccacaaaccccattactaaacccacactcaacagaaacaaagcatacatcattattctcgcacggactacaaccacgaccaatgatatgaaaaaccatcgttgtatttcaacta

SEQ ID NO: 69212 - DNA, 120 bp, Homo sapiens; identical to SEQ ID NO: 52534
  misc_feature: 792 for SV(C|O) and mtDNA

SEQ ID NO: 69213 - DNA, 120 bp, Homo sapiens
  misc_feature: 792 for SV(C|O) and mtDNA
acgaatgatttcgactcattaaattatgataatcatatttaccaaatgcccctcatttacataaatattatactagcatttaccatctcacttctaggaatactagtataccgctcacac

SEQ ID NO: 69214 - DNA, 120 bp, Homo sapiens
  misc_feature: 792 for SV(C|O) and mtDNA
gggtggctttggagttgcagttgatgtgtgatagttgagggttgattgctgtacttgcttgtaagcatggggagggggttttgatgtggattgggtttttatgtactacaggtggtcaag

SEQ ID NO: 69215 - DNA, 120 bp, Homo sapiens; identical to SEQ ID NO: 56871
  misc_feature: 792 for SV(C|O) and mtDNA

SEQ ID NO: 69216 - DNA, 120 bp, Homo sapiens
  misc_feature: 792 for SV(C|O) and mtDNA
gatctcttatactagtatccttaatcatttttattgccacaactaacctcctcggactcctgcctcactcatttacaccaaccacccaactatctataaacctagccatggccatcccct

SEQ ID NO: 69217 - DNA, 120 bp, Homo sapiens
  misc_feature: 792 for SV(C|O) and mtDNA
gataaataataggatgaggcaggaatcaaagacagatactgcgacatagggtgctccggctccagcgtctcgcaatgctatcgcgtgcacaccccccagacgaaaataccaaatgcatgg

SEQ ID NO: 69218 - DNA, 120 bp, Homo sapiens
  misc_feature: 792 for SV(C|O) and mtDNA
gaaaatcacctcggagctggtaaaaagaggcctaacccctgtctttagatttacagtccaatgcttcactcagccattttacctcacccccactgatgttcgccgaccgttgactattct

SEQ ID NO: 69219 - DNA, 120 bp, Homo sapiens; identical to SEQ ID NO: 54537
  misc_feature: 792 for SV(C|O) and mtDNA

SEQ ID NO: 69220 - DNA, 120 bp, Homo sapiens
  misc_feature: 792 for SV(C|O) and mtDNA
atattcatggtggctggcagtaatgtacgaattacatagcggttgttgatgggtgagtcaatacttgggtggcacccaaatctgcttccccatgaaagaacagagaatagtttaaattag

SEQ ID NO: 69221 - DNA, 120 bp, Homo sapiens
  misc_feature: 792 for SV(C|O) and mtDNA
aagtccgtggaagcctgtggctacaaaaaatgttgagccgtagatgccgtcggaaatggtgaagggagactcgaagtactctgaggcttgtaggagggtaaaatagagacccagtaaaat

SEQ ID NO: 69222 - DNA, 120 bp, Homo sapiens
  misc_feature: 791 for SV(C|O) and mtDNA
taagtgtagagggaaggttaatggttgatattgctagggtggcgcttccaattaggtgcatgagtaggtggcctgcagtaatgttagcggttaggcgtacggccagggctattggttgaa

SEQ ID NO: 69223 - DNA, 120 bp, Homo sapiens; identical to SEQ ID NO: 52548
  misc_feature: 791 for SV(C|O) and mtDNA

SEQ ID NO: 69224 - DNA, 120 bp, Homo sapiens; identical to SEQ ID NO: 54856
  misc_feature: 791 for SV(C|O) and mtDNA

SEQ ID NO: 69225 - DNA, 120 bp, Homo sapiens; identical to SEQ ID NO: 52149
  misc_feature: 791 for SV(C|O) and mtDNA

SEQ ID NO: 69226 - DNA, 120 bp, Homo sapiens; identical to SEQ ID NO: 52608
  misc_feature: 791 for SV(C|O) and mtDNA

SEQ ID NO: 69227 - DNA, 120 bp, Homo sapiens
  misc_feature: 791 for SV(C|O) and mtDNA
aattgtcagttcagtgttttaatctgacgcaggcttatgcggaggagaatgttttcatgttacttatactaacattagttcttctatagggtgatagattggtccaattgggtgtgagga

SEQ ID NO: 69228 - DNA, 120 bp, Homo sapiens
  misc_feature: 791 for SV(C|O) and mtDNA
tcataaggggatggccatggctaggtttatagatagttgggtggttggtgtaaatgagtgaggcaggagtccgaggaggttagttgtggcaataaaaatgattaaggatactagtataag

SEQ ID NO: 69229 - DNA, 120 bp, Homo sapiens
  misc_feature: 791 for SV(C|O) and mtDNA
tcagtgttttaatctgacgcaggcttatgcggaggagaatgttttcatgttacttatactaacattagttcttctatagggtgatagattggtccaattgggtgtgaggagttcagttat

SEQ ID NO: 69230 - DNA, 120 bp, Homo sapiens
  misc_feature: 791 for SV(C|O) and mtDNA
actagttttgacaacattcaaaaaagagtaataaacttcgccttaattttaataatcaacaccctcctagccttactactaataattattacattttgactaccacaactcaacggctac

SEQ ID NO: 69231 - DNA, 120 bp, Homo sapiens
  misc_feature: 791 for SV(C|O) and mtDNA
ataatcaacaccctcctagccttactactaataattattacattttgactaccacaactcaacggctacatagaaaaatccaccccttacgagtgcggcttcgaccctatatcccccgcc

SEQ ID NO: 69232 - DNA, 120 bp, Homo sapiens
  misc_feature: 791 for SV(C|O) and mtDNA
gcgtattataccatagccgcctagttttaagagtactgcggcaagtactattgacccagcgatgggggcttcgacatgggctttagggagtcataagtggagtccgtaaagaggtatctt

SEQ ID NO: 69233 - DNA, 120 bp, Homo sapiens
  misc_feature: 791 for SV(C|O) and mtDNA
caaagctggtttcaagccaaccccatggcctccatgactttttcaaaaaggtattagaaaaaccatttcataactttgtcaaagttaaattataggctaaatcctatatatcttaatggc

SEQ ID NO: 69234 - DNA, 120 bp, Homo sapiens
  misc_feature: 791 for SV(C|O) and mtDNA
ctggagtgactatatggatgccccccaccctaccacacattcgaagaacccgtatacataaaatctagacaaaaaaggaaggaatcgaaccccccaaagctggtttcaagccaaccccat

SEQ ID NO: 69235 - DNA, 120 bp, Homo sapiens
  misc_feature: 791 for SV(C|O) and mtDNA
ctccaaatatctcatcaacaaccgactaatcaccacccaacaatgactaatcaaactaacctcaaaacaaatgataaccatacacaacactaaaggacgaacctgatctcttatactagt

SEQ ID NO: 69236 - DNA, 120 bp, Homo sapiens
  misc_feature: 791 for SV(C|O) and mtDNA
cgttggtcaagttattggatcaattgagtatagtagttcgctttgactggtgaagtcttagcatgtactgctcggaggttgggttctgctccgaggtcgccccaaccgaaatttttaatg

SEQ ID NO: 69237 - DNA, 120 bp, Homo sapiens; identical to SEQ ID NO: 62704
  misc_feature: 791 for SV(C|O) and mtDNA

SEQ ID NO: 69238 - DNA, 120 bp, Homo sapiens
  misc_feature: 791 for SV(C|O) and mtDNA
cacccgaccacaccgctaacaatcaatactaaacccccataaataggagaaggcttagaagaaaaccccacaaaccccattactaaacccacactcaacagaaacaaagcatacatcatt

SEQ ID NO: 69239 - DNA, 120 bp, Homo sapiens
  misc_feature: 791 for SV(C|O) and mtDNA
agatgataagtgtagagggaaggttaatggttgatattgctagggtggcgcttccaattaggtgcatgagtaggtggcctgcagtaatgttagcggttaggcgtacggccagggctattg

SEQ ID NO: 69240 - DNA, 120 bp, Homo sapiens
  misc_feature: 791 for SV(C|O) and mtDNA
aagtgtagagggaaggttaatggttgatattgctagggtggcgcttccaattaggtgcatgagtaggtggcctgcagtaatgttagcggttaggcgtacggccagggctattggttgaat

SEQ ID NO: 69241 - DNA, 120 bp, Homo sapiens
  misc_feature: 791 for SV(C|O) and mtDNA
attaaggagatttgtagggagattagtatagagaggtagagtttttttcgtgatagtggttcactggataagtggcgttggcttgccatgattgtgaggggtaggagtcaggtagttagt

SEQ ID NO: 69242 - DNA, 120 bp, Homo sapiens
  misc_feature: 791 for SV(C|O) and mtDNA
atcttagagcgaaagcctataatcactgcgcccgctcataaggggatggccatggctaggtttatagatagttgggtggttggtgtaaatgagtgaggcaggagtccgaggaggttagtt

SEQ ID NO: 69243 - DNA, 120 bp, Homo sapiens
  misc_feature: 791 for SV(C|O) and mtDNA
aagagatcaggttcgtcctttagtgttgtgtatggttatcatttgttttgaggttagtttgattagtcattgttgggtggtgattagtcggttgttgatgagatatttggaggtggggat

SEQ ID NO: 69244 - DNA, 120 bp, Homo sapiens
  misc_feature: 790 for SV(C|O) and mtDNA
cgcttcgaagcgaaaagtcctaatagtagaagaaccctccataaacctggagtgactatatggatgccccccaccctaccacacattcgaagaacccgtatacataaaatctagacaaaa

SEQ ID NO: 69245 - DNA, 120 bp, Homo sapiens
  misc_feature: 790 for SV(C|O) and mtDNA
tttgtttaaactatataccaattcggttcagtctaatcctttttgtagtcactcataggccagacttagggctaggatgatgattaataagagggatgacataactattagtggtaggtt

SEQ ID NO: 69246 - DNA, 120 bp, Homo sapiens
  misc_feature: 790 for SV(C|O) and mtDNA
cacctcggagctggtaaaaagaggcctaacccctgtctttagatttacagtccaatgcttcactcagccattttacctcacccccactgatgttcgccgaccgttgactattctctacaa

SEQ ID NO: 69247 - DNA, 120 bp, Homo sapiens; identical to SEQ ID NO: 52676
  misc_feature: 790 for SV(C|O) and mtDNA

SEQ ID NO: 69248 - DNA, 120 bp, Homo sapiens
  misc_feature: 790 for SV(C|O) and mtDNA
ttaaggagatttgtagggagattagtatagagaggtagagtttttttcgtgatagtggttcactggataagtggcgttggcttgccatgattgtgaggggtaggagtcaggtagttagta

SEQ ID NO: 69249 - DNA, 120 bp, Homo sapiens
  misc_feature: 790 for SV(C|O) and mtDNA
tgggctttggtgagggaggtaggtggtagtttgtgtttaatatttttagttgggtgatgaggaatagtgtaaggagtatgggggtaattatggtgggccatacggtagtatttagttggg

SEQ ID NO: 69250 - DNA, 120 bp, Homo sapiens
  misc_feature: 790 for SV(C|O) and mtDNA
attatcgaaaccatcagcctactcattcaaccaatagccctggccgtacgcctaaccgctaacattactgcaggccacctactcatgcacctaattggaagcgccaccctagcaatatca

SEQ ID NO: 69251 - DNA, 120 bp, Homo sapiens; identical to SEQ ID NO: 53244
  misc_feature: 790 for SV(C|O) and mtDNA

SEQ ID NO: 69252 - DNA, 120 bp, Homo sapiens; identical to SEQ ID NO: 56311
  misc_feature: 790 for SV(C|O) and mtDNA

SEQ ID NO: 69253 - DNA, 120 bp, Homo sapiens; identical to SEQ ID NO: 54576
  misc_feature: 790 for SV(C|O) and mtDNA

SEQ ID NO: 69254 - DNA, 120 bp, Homo sapiens; identical to SEQ ID NO: 54527
  misc_feature: 790 for SV(C|O) and mtDNA

SEQ ID NO: 69255 - DNA, 120 bp, Homo sapiens; identical to SEQ ID NO: 56764
  misc_feature: 790 for SV(C|O) and mtDNA

SEQ ID NO: 69256 - DNA, 120 bp, Homo sapiens
  misc_feature: 790 for SV(C|O) and mtDNA
gtggggttttcttctaagccttctcctatttatgggggtttagtattgattgttagcggtgtggtcgggtgtgttattattctgaattttgggggaggttatatgggtttaatagttttt

SEQ ID NO: 69257 - DNA, 120 bp, Homo sapiens
  misc_feature: 790 for SV(C|O) and mtDNA
ggtcgtggttgtagtccgtgcgagaataatgatgtatgctttgtttctgttgagtgtgggtttagtaatggggtttgtggggttttcttctaagccttctcctatttatgggggtttagt

SEQ ID NO: 69258 - DNA, 120 bp, Homo sapiens
  misc_feature: 790 for SV(C|O) and mtDNA
gcatttttaatcttagagcgaaagcctataatcactgcgcccgctcataaggggatggccatggctaggtttatagatagttgggtggttggtgtaaatgagtgaggcaggagtccgagg

SEQ ID NO: 69259 - DNA, 120 bp, Homo sapiens; identical to SEQ ID NO: 56554
  misc_feature: 790 for SV(C|O) and mtDNA

SEQ ID NO: 69260 - DNA, 120 bp, Homo sapiens
  misc_feature: 790 for SV(C|O) and mtDNA
ctatataccaattcggttcagtctaatcctttttgtagtcactcataggccagacttagggctaggatgatgattaataagagggatgacataactattagtggtaggttagttgtttgt

SEQ ID NO: 69261 - DNA, 120 bp, Homo sapiens
  misc_feature: 790 for SV(C|O) and mtDNA
aataggtatagtgttccaatgtctttgtggtttgtagagaatagtcaacggtcggcgaacatcagtgggggtgaggtaaaatggctgagtgaagcattggactgtaaatctaaagacagg

SEQ ID NO: 69262 - DNA, 120 bp, Homo sapiens
  misc_feature: 790 for SV(C|O) and mtDNA
ccgttggtcaagttattggatcaattgagtatagtagttcgctttgactggtgaagtcttagcatgtactgctcggaggttgggttctgctccgaggtcgccccaaccgaaatttttaat

SEQ ID NO: 69263 - DNA, 120 bp, Homo sapiens
  misc_feature: 790 for SV(C|O) and mtDNA
catgttacttatactaacattagttcttctatagggtgatagattggtccaattgggtgtgaggagttcagttatatgtttgggattttttaggtagtgggtgttgagcttgaacgcttt

SEQ ID NO: 69264 - DNA, 120 bp, Homo sapiens
  misc_feature: 790 for SV(C|O) and mtDNA
cacctccaaatatctcatcaacaaccgactaatcaccacccaacaatgactaatcaaactaacctcaaaacaaatgataaccatacacaacactaaaggacgaacctgatctcttatact

SEQ ID NO: 69265 - DNA, 120 bp, Homo sapiens; identical to SEQ ID NO: 52100
  misc_feature: 790 for SV(C|O) and mtDNA

SEQ ID NO: 69266 - DNA, 120 bp, Homo sapiens; identical to SEQ ID NO: 57127
  misc_feature: 790 for SV(C|O) and mtDNA

SEQ ID NO: 69267 - DNA, 120 bp, Homo sapiens; identical to SEQ ID NO: 52042
  misc_feature: 789 for SV(C|O) and mtDNA

SEQ ID NO: 69268 - DNA, 120 bp, Homo sapiens
  misc_feature: 789 for SV(C|O) and mtDNA
ttatggtaccgtacaatattcatggtggctggcagtaatgtacgaattacatagcggttgttgatgggtgagtcaatacttgggtggcacccaaatctgcttccccatgaaagaacagag

SEQ ID NO: 69269 - DNA, 120 bp, Homo sapiens
  misc_feature: 789 for SV(C|O) and mtDNA
gagttactttgatagagtaaataataggagcttaaacccccttatttctaggactatgagaatcgaacccatccctgagaatccaaaattctccgtgccacctatcacaccccatcctaa

SEQ ID NO: 69270 - DNA, 120 bp, Homo sapiens
  misc_feature: 789 for SV(C|O) and mtDNA
tgtgtttaggagtgggacttctaggggatttagcggggtgatgcctgttgggggccagtgccctcctaattggggggtaggggctaggctggagtggtaaaaggctcagaaaaatcctgc

SEQ ID NO: 69271 - DNA, 120 bp, Homo sapiens
  misc_feature: 789 for SV(C|O) and mtDNA
tggggttttcttctaagccttctcctatttatgggggtttagtattgattgttagcggtgtggtcgggtgtgttattattctgaattttgggggaggttatatgggtttaatagtttttt

SEQ ID NO: 69272 - DNA, 120 bp, Homo sapiens
  misc_feature: 789 for SV(C|O) and mtDNA
tggaagcctgtggctacaaaaaatgttgagccgtagatgccgtcggaaatggtgaagggagactcgaagtactctgaggcttgtaggagggtaaaatagagacccagtaaaattgtaata

SEQ ID NO: 69273 - DNA, 120 bp, Homo sapiens; identical to SEQ ID NO: 52489
  misc_feature: 789 for SV(C|O) and mtDNA

SEQ ID NO: 69274 - DNA, 120 bp, Homo sapiens
  misc_feature: 789 for SV(C|O) and mtDNA
tccggaatgccccgacgttactcggactaccccgatgcatacaccacatgaaacatcctatcatctgtaggctcattcatttctctaacagcagtaatattaataattttcatgatttga

SEQ ID NO: 69275 - DNA, 120 bp, Homo sapiens
  misc_feature: 789 for SV(C|O) and mtDNA
tcaaataataagaaggtaatagctactaagaagaattttatggagaaagggacgcgggcgggggatatagggtcgaagccgcactcgtaaggggtggatttttctatgtagccgttgagt

SEQ ID NO: 69276 - DNA, 120 bp, Homo sapiens
  misc_feature: 789 for SV(C|O) and mtDNA
aatgacagtttgaacatacaaaacccaccccattcctccccacactcatcgcccttaccacgctactcctacctatctccccttttatactaataatcttatagaaatttaggttaaata

SEQ ID NO: 69277 - DNA, 120 bp, Homo sapiens; identical to SEQ ID NO: 54950
  misc_feature: 789 for SV(C|O) and mtDNA

SEQ ID NO: 69278 - DNA, 120 bp, Homo sapiens
  misc_feature: 789 for SV(C|O) and mtDNA
gtcgtggttgtagtccgtgcgagaataatgatgtatgctttgtttctgttgagtgtgggtttagtaatggggtttgtggggttttcttctaagccttctcctatttatgggggtttagta

SEQ ID NO: 69279 - DNA, 120 bp, Homo sapiens
  misc_feature: 789 for SV(C|O) and mtDNA
gttcagtgttttaatctgacgcaggcttatgcggaggagaatgttttcatgttacttatactaacattagttcttctatagggtgatagattggtccaattgggtgtgaggagttcagtt

SEQ ID NO: 69280 - DNA, 120 bp, Homo sapiens
  misc_feature: 789 for SV(C|O) and mtDNA
aagctggtttcaagccaaccccatggcctccatgactttttcaaaaaggtattagaaaaaccatttcataactttgtcaaagttaaattataggctaaatcctatatatcttaatggcac

SEQ ID NO: 69281 - DNA, 120 bp, Homo sapiens
  misc_feature: 789 for SV(C|O) and mtDNA
aaaccccacaaaccccattactaaacccacactcaacagaaacaaagcatacatcattattctcgcacggactacaaccacgaccaatgatatgaaaaaccatcgttgtatttcaactac

SEQ ID NO: 69282 - DNA, 120 bp, Homo sapiens; identical to SEQ ID NO: 56173
  misc_feature: 789 for SV(C|O) and mtDNA

SEQ ID NO: 69283 - DNA, 120 bp, Homo sapiens; identical to SEQ ID NO: 55199
  misc_feature: 789 for SV(C|O) and mtDNA

SEQ ID NO: 69284 - DNA, 120 bp, Homo sapiens; identical to SEQ ID NO: 51801
  misc_feature: 789 for SV(C|O) and mtDNA

SEQ ID NO: 69285 - DNA, 120 bp, Homo sapiens
  misc_feature: 789 for SV(C|O) and mtDNA
attggtgttcttgtagttgaaatacaacgatggtttttcatatcattggtcgtggttgtagtccgtgcgagaataatgatgtatgctttgtttctgttgagtgtgggtttagtaatgggg

SEQ ID NO: 69286 - DNA, 120 bp, Homo sapiens
  misc_feature: 789 for SV(C|O) and mtDNA
ccaaagctggtttcaagccaaccccatggcctccatgactttttcaaaaaggtattagaaaaaccatttcataactttgtcaaagttaaattataggctaaatcctatatatcttaatgg

SEQ ID NO: 69287 - DNA, 120 bp, Homo sapiens; identical to SEQ ID NO: 52361
  misc_feature: 789 for SV(C|O) and mtDNA

SEQ ID NO: 69288 - DNA, 120 bp, Homo sapiens
  misc_feature: 789 for SV(C|O) and mtDNA
aaatgacagtttgaacatacaaaacccaccccattcctccccacactcatcgcccttaccacgctactcctacctatctccccttttatactaataatcttatagaaatttaggttaaat

SEQ ID NO: 69289 - DNA, 120 bp, Homo sapiens
  misc_feature: 789 for SV(C|O) and mtDNA
agtactgcggcaagtactattgacccagcgatgggggcttcgacatgggctttagggagtcataagtggagtccgtaaagaggtatctttactataaaagctattgtgtaagctagtcat

SEQ ID NO: 69290 - DNA, 120 bp, Homo sapiens
  misc_feature: 789 for SV(C|O) and mtDNA
aggattatcccgtatcgaaggcctttttggacaggtggtgtgtggtggccttggtatgtgctttctcgtgttacatcgcgccatcattggtatatggttagtgtgttggttagtaggcct

SEQ ID NO: 69291 - DNA, 120 bp, Homo sapiens
  misc_feature: 789 for SV(C|O) and mtDNA
aaatcacctcggagctggtaaaaagaggcctaacccctgtctttagatttacagtccaatgcttcactcagccattttacctcacccccactgatgttcgccgaccgttgactattctct

SEQ ID NO: 69292 - DNA, 120 bp, Homo sapiens
  misc_feature: 788 for SV(C|O) and mtDNA
tttttaatcttagagcgaaagcctataatcactgcgcccgctcataaggggatggccatggctaggtttatagatagttgggtggttggtgtaaatgagtgaggcaggagtccgaggagg

SEQ ID NO: 69293 - DNA, 120 bp, Homo sapiens
  misc_feature: 788 for SV(C|O) and mtDNA
tgacagtttgaacatacaaaacccaccccattcctccccacactcatcgcccttaccacgctactcctacctatctccccttttatactaataatcttatagaaatttaggttaaataca

SEQ ID NO: 69294 - DNA, 120 bp, Homo sapiens
  misc_feature: 788 for SV(C|O) and mtDNA
tgctccggctccagcgtctcgcaatgctatcgcgtgcacaccccccagacgaaaataccaaatgcatggagagctcccgtgagtggttaatagggtgatagacctgtgatccatcgtgat

SEQ ID NO: 69295 - DNA, 120 bp, Homo sapiens
  misc_feature: 788 for SV(C|O) and mtDNA
tgatctcttatactagtatccttaatcatttttattgccacaactaacctcctcggactcctgcctcactcatttacaccaaccacccaactatctataaacctagccatggccatcccc

SEQ ID NO: 69296 - DNA, 120 bp, Homo sapiens
  misc_feature: 788 for SV(C|O) and mtDNA
tatggtaccgtacaatattcatggtggctggcagtaatgtacgaattacatagcggttgttgatgggtgagtcaatacttgggtggcacccaaatctgcttccccatgaaagaacagaga

SEQ ID NO: 69297 - DNA, 120 bp, Homo sapiens; identical to SEQ ID NO: 52519
  misc_feature: 788 for SV(C|O) and mtDNA

SEQ ID NO: 69298 - DNA, 120 bp, Homo sapiens
  misc_feature: 788 for SV(C|O) and mtDNA
taggattatcccgtatcgaaggcctttttggacaggtggtgtgtggtggccttggtatgtgctttctcgtgttacatcgcgccatcattggtatatggttagtgtgttggttagtaggcc

SEQ ID NO: 69299 - DNA, 120 bp, Homo sapiens
  misc_feature: 788 for SV(C|O) and mtDNA
caattaactagttttgacaacattcaaaaaagagtaataaacttcgccttaattttaataatcaacaccctcctagccttactactaataattattacattttgactaccacaactcaac

SEQ ID NO: 69300 - DNA, 120 bp, Homo sapiens
  misc_feature: 788 for SV(C|O) and mtDNA
cacaaaccccattactaaacccacactcaacagaaacaaagcatacatcattattctcgcacggactacaaccacgaccaatgatatgaaaaaccatcgttgtatttcaactacaagaac

SEQ ID NO: 69301 - DNA, 120 bp, Homo sapiens
  misc_feature: 788 for SV(C|O) and mtDNA
gtggttgtagtccgtgcgagaataatgatgtatgctttgtttctgttgagtgtgggtttagtaatggggtttgtggggttttcttctaagccttctcctatttatgggggtttagtattg

SEQ ID NO: 69302 - DNA, 120 bp, Homo sapiens
  misc_feature: 788 for SV(C|O) and mtDNA
caaaccatttacccaaataaagtataggcgatagaaattgaaacctggcgcaatagatatagtaccgcaagggaaagatgaaaaattataaccaagcataatacagcaaggactaacccc

SEQ ID NO: 69303 - DNA, 120 bp, Homo sapiens
  misc_feature: 788 for SV(C|O) and mtDNA
ggcatttttaatcttagagcgaaagcctataatcactgcgcccgctcataaggggatggccatggctaggtttatagatagttgggtggttggtgtaaatgagtgaggcaggagtccgag

SEQ ID NO: 69304 - DNA, 120 bp, Homo sapiens; identical to SEQ ID NO: 52771
  misc_feature: 788 for SV(C|O) and mtDNA

SEQ ID NO: 69305 - DNA, 120 bp, Homo sapiens; identical to SEQ ID NO: 52347
  misc_feature: 788 for SV(C|O) and mtDNA

SEQ ID NO: 69306 - DNA, 120 bp, Homo sapiens
  misc_feature: 788 for SV(C|O) and mtDNA
cctccaaatatctcatcaacaaccgactaatcaccacccaacaatgactaatcaaactaacctcaaaacaaatgataaccatacacaacactaaaggacgaacctgatctcttatactag

SEQ ID NO: 69307 - DNA, 120 bp, Homo sapiens
  misc_feature: 788 for SV(C|O) and mtDNA
agggcatttttaatcttagagcgaaagcctataatcactgcgcccgctcataaggggatggccatggctaggtttatagatagttgggtggttggtgtaaatgagtgaggcaggagtccg

SEQ ID NO: 69308 - DNA, 120 bp, Homo sapiens
  misc_feature: 788 for SV(C|O) and mtDNA
cattggtgttcttgtagttgaaatacaacgatggtttttcatatcattggtcgtggttgtagtccgtgcgagaataatgatgtatgctttgtttctgttgagtgtgggtttagtaatggg

SEQ ID NO: 69309 - DNA, 120 bp, Homo sapiens; identical to SEQ ID NO: 55876
  misc_feature: 788 for SV(C|O) and mtDNA

SEQ ID NO: 69310 - DNA, 120 bp, Homo sapiens
  misc_feature: 788 for SV(C|O) and mtDNA
atttaacacccatagtaggcctaaaagcagccaccaattaagaaagcgttcaagctcaacacccactacctaaaaaatcccaaacatataactgaactcctcacacccaattggaccaat

SEQ ID NO: 69311 - DNA, 120 bp, Homo sapiens
  misc_feature: 787 for SV(C|O) and mtDNA
ttgaccgctctgagctaaacctagccccaaacccactccaccttactaccagacaaccttagccaaaccatttacccaaataaagtataggcgatagaaattgaaacctggcgcaataga

SEQ ID NO: 69312 - DNA, 120 bp, Homo sapiens
  misc_feature: 787 for SV(C|O) and mtDNA
ttcctcacgcaagcaaccgcatccataatccttctaatagctatcctcttcaacaatatactctccggacaatgaaccataaccaatactaccaatcaatactcatcattaataatcata

SEQ ID NO: 69313 - DNA, 120 bp, Homo sapiens
  misc_feature: 787 for SV(C|O) and mtDNA
taggatgtttcatgtggtgtatgcatcggggtagtccgagtaacgtcggggcattccggataggccgagaaagtgttgtgggaagaaagttagatttacgccgatgaatatgatagtgaa

SEQ ID NO: 69314 - DNA, 120 bp, Homo sapiens; identical to SEQ ID NO: 56783
  misc_feature: 787 for SV(C|O) and mtDNA

SEQ ID NO: 69315 - DNA, 120 bp, Homo sapiens; identical to SEQ ID NO: 52375
  misc_feature: 787 for SV(C|O) and mtDNA

SEQ ID NO: 69316 - DNA, 120 bp, Homo sapiens
  misc_feature: 787 for SV(C|O) and mtDNA
gtacaatattcatggtggctggcagtaatgtacgaattacatagcggttgttgatgggtgagtcaatacttgggtggcacccaaatctgcttccccatgaaagaacagagaatagtttaa

SEQ ID NO: 69317 - DNA, 120 bp, Homo sapiens
  misc_feature: 787 for SV(C|O) and mtDNA
gtaatattaataattttcatgatttgagaagccttcgcttcgaagcgaaaagtcctaatagtagaagaaccctccataaacctggagtgactatatggatgccccccaccctaccacaca

SEQ ID NO: 69318 - DNA, 120 bp, Homo sapiens
  misc_feature: 787 for SV(C|O) and mtDNA
tggtaccgtacaatattcatggtggctggcagtaatgtacgaattacatagcggttgttgatgggtgagtcaatacttgggtggcacccaaatctgcttccccatgaaagaacagagaat

SEQ ID NO: 69319 - DNA, 120 bp, Homo sapiens
  misc_feature: 787 for SV(C|O) and mtDNA
tggagtgactatatggatgccccccaccctaccacacattcgaagaacccgtatacataaaatctagacaaaaaaggaaggaatcgaaccccccaaagctggtttcaagccaaccccatg

SEQ ID NO: 69320 - DNA, 120 bp, Homo sapiens
  misc_feature: 787 for SV(C|O) and mtDNA
tgagaatgagtgtgaggcgtattataccatagccgcctagttttaagagtactgcggcaagtactattgacccagcgatgggggcttcgacatgggctttagggagtcataagtggagtc

SEQ ID NO: 69321 - DNA, 120 bp, Homo sapiens
  misc_feature: 787 for SV(C|O) and mtDNA
tcccaaacatataactgaactcctcacacccaattggaccaatctatcaccctatagaagaactaatgttagtataagtaacatgaaaacattctcctccgcataagcctgcgtcagatt

SEQ ID NO: 69322 - DNA, 120 bp, Homo sapiens
  misc_feature: 787 for SV(C|O) and mtDNA
ggcgtaggtttggtctagggtgtagcctgagaataggggaaatcagtgaatgaagcctcctatgatggcaaatacagctcctattgataggacatagtggaagtgagctacaacgtagta

SEQ ID NO: 69323 - DNA, 120 bp, Homo sapiens
  misc_feature: 787 for SV(C|O) and mtDNA
gtgttgtgagtgtaaattagtgcgatgagtaggggaagggagcctactagggtgtagaataggaagtatgtgcctgcgttcaggcgttctggctggttgcctcatcgggtgatgatagcc

SEQ ID NO: 69324 - DNA, 120 bp, Homo sapiens; identical to SEQ ID NO: 57277
  misc_feature: 787 for SV(C|O) and mtDNA

SEQ ID NO: 69325 - DNA, 120 bp, Homo sapiens
  misc_feature: 787 for SV(C|O) and mtDNA
ggtgttgtgagtgtaaattagtgcgatgagtaggggaagggagcctactagggtgtagaataggaagtatgtgcctgcgttcaggcgttctggctggttgcctcatcgggtgatgatagc

SEQ ID NO: 69326 - DNA, 120 bp, Homo sapiens
  misc_feature: 787 for SV(C|O) and mtDNA
ggggttttcttctaagccttctcctatttatgggggtttagtattgattgttagcggtgtggtcgggtgtgttattattctgaattttgggggaggttatatgggtttaatagttttttt

SEQ ID NO: 69327 - DNA, 120 bp, Homo sapiens
  misc_feature: 787 for SV(C|O) and mtDNA
agaattgtgaagatgataagtgtagagggaaggttaatggttgatattgctagggtggcgcttccaattaggtgcatgagtaggtggcctgcagtaatgttagcggttaggcgtacggcc

SEQ ID NO: 69328 - DNA, 120 bp, Homo sapiens
  misc_feature: 787 for SV(C|O) and mtDNA
ggagatttgtagggagattagtatagagaggtagagtttttttcgtgatagtggttcactggataagtggcgttggcttgccatgattgtgaggggtaggagtcaggtagttagtattag

SEQ ID NO: 69329 - DNA, 120 bp, Homo sapiens; identical to SEQ ID NO: 53093
  misc_feature: 787 for SV(C|O) and mtDNA

SEQ ID NO: 69330 - DNA, 120 bp, Homo sapiens; identical to SEQ ID NO: 52702
  misc_feature: 787 for SV(C|O) and mtDNA

SEQ ID NO: 69331 - DNA, 120 bp, Homo sapiens; identical to SEQ ID NO: 55302
  misc_feature: 787 for SV(C|O) and mtDNA

SEQ ID NO: 69332 - DNA, 120 bp, Homo sapiens
  misc_feature: 787 for SV(C|O) and mtDNA
cgatgagtaggggaagggagcctactagggtgtagaataggaagtatgtgcctgcgttcaggcgttctggctggttgcctcatcgggtgatgatagccaaggtggggataagtgtggttt

SEQ ID NO: 69333 - DNA, 120 bp, Homo sapiens
  misc_feature: 787 for SV(C|O) and mtDNA
catcaacaaccgactaatcaccacccaacaatgactaatcaaactaacctcaaaacaaatgataaccatacacaacactaaaggacgaacctgatctcttatactagtatccttaatcat

SEQ ID NO: 69334 - DNA, 120 bp, Homo sapiens
  misc_feature: 786 for SV(C|O) and mtDNA
tttcctcacgcaagcaaccgcatccataatccttctaatagctatcctcttcaacaatatactctccggacaatgaaccataaccaatactaccaatcaatactcatcattaataatcat

SEQ ID NO: 69335 - DNA, 120 bp, Homo sapiens
  misc_feature: 786 for SV(C|O) and mtDNA
cctagccccaaacccactccaccttactaccagacaaccttagccaaaccatttacccaaataaagtataggcgatagaaattgaaacctggcgcaatagatatagtaccgcaagggaaa

SEQ ID NO: 69336 - DNA, 120 bp, Homo sapiens
  misc_feature: 786 for SV(C|O) and mtDNA
agttactttgatagagtaaataataggagcttaaacccccttatttctaggactatgagaatcgaacccatccctgagaatccaaaattctccgtgccacctatcacaccccatcctaaa

SEQ ID NO: 69337 - DNA, 120 bp, Homo sapiens
  misc_feature: 786 for SV(C|O) and mtDNA
ttgattagtagtagttactggttgaacattgtttgttggtgtatatattgtaattgagattgctcgggggaataggttatgtgattaggagtagggttaggatgagtgggaagaagaaag

SEQ ID NO: 69338 - DNA, 120 bp, Homo sapiens
  misc_feature: 786 for SV(C|O) and mtDNA
atcgctaaccccactaaaacactcaccaagacctcaacccctgacccccatgcctcaggatactcctcaatagccatcgctgtagtatatccaaagacaaccatcattccccctaaataa

SEQ ID NO: 69339 - DNA, 120 bp, Homo sapiens; identical to SEQ ID NO: 57373
  misc_feature: 786 for SV(C|O) and mtDNA

SEQ ID NO: 69340 - DNA, 120 bp, Homo sapiens
  misc_feature: 786 for SV(C|O) and mtDNA
aacgaatgatttcgactcattaaattatgataatcatatttaccaaatgcccctcatttacataaatattatactagcatttaccatctcacttctaggaatactagtataccgctcaca

SEQ ID NO: 69341 - DNA, 120 bp, Homo sapiens
  misc_feature: 786 for SV(C|O) and mtDNA
tgtcagttcagtgttttaatctgacgcaggcttatgcggaggagaatgttttcatgttacttatactaacattagttcttctatagggtgatagattggtccaattgggtgtgaggagtt

SEQ ID NO: 69342 - DNA, 120 bp, Homo sapiens
  misc_feature: 786 for SV(C|O) and mtDNA
actatatggatgccccccaccctaccacacattcgaagaacccgtatacataaaatctagacaaaaaaggaaggaatcgaaccccccaaagctggtttcaagccaaccccatggcctcca

SEQ ID NO: 69343 - DNA, 120 bp, Homo sapiens
  misc_feature: 786 for SV(C|O) and mtDNA
cataaggggatggccatggctaggtttatagatagttgggtggttggtgtaaatgagtgaggcaggagtccgaggaggttagttgtggcaataaaaatgattaaggatactagtataaga

SEQ ID NO: 69344 - DNA, 120 bp, Homo sapiens
  misc_feature: 786 for SV(C|O) and mtDNA
tcgtggttgtagtccgtgcgagaataatgatgtatgctttgtttctgttgagtgtgggtttagtaatggggtttgtggggttttcttctaagccttctcctatttatgggggtttagtat

SEQ ID NO: 69345 - DNA, 120 bp, Homo sapiens
  misc_feature: 786 for SV(C|O) and mtDNA
tcgcacggactacaaccacgaccaatgatatgaaaaaccatcgttgtatttcaactacaagaacaccaatgaccccaatacgcaaaattaaccccctaataaaattaattaaccactcat

SEQ ID NO: 69346 - DNA, 120 bp, Homo sapiens
  misc_feature: 786 for SV(C|O) and mtDNA
tcgaatttgcaattcaatatgaaaatcacctcggagctggtaaaaagaggcctaacccctgtctttagatttacagtccaatgcttcactcagccattttacctcacccccactgatgtt

SEQ ID NO: 69347 - DNA, 120 bp, Homo sapiens
  misc_feature: 786 for SV(C|O) and mtDNA
catttttaatcttagagcgaaagcctataatcactgcgcccgctcataaggggatggccatggctaggtttatagatagttgggtggttggtgtaaatgagtgaggcaggagtccgagga

SEQ ID NO: 69348 - DNA, 120 bp, Homo sapiens
  misc_feature: 786 for SV(C|O) and mtDNA
ggaatgatggttgtctttggatatactacagcgatggctattgaggagtatcctgaggcatgggggtcaggggttgaggtcttggtgagtgttttagtggggttagcgatggaggtagga

SEQ ID NO: 69349 - DNA, 120 bp, Homo sapiens
  misc_feature: 786 for SV(C|O) and mtDNA
tcatgttacttatactaacattagttcttctatagggtgatagattggtccaattgggtgtgaggagttcagttatatgtttgggattttttaggtagtgggtgttgagcttgaacgctt

SEQ ID NO: 69350 - DNA, 120 bp, Homo sapiens; identical to SEQ ID NO: 52379
  misc_feature: 786 for SV(C|O) and mtDNA

SEQ ID NO: 69351 - DNA, 120 bp, Homo sapiens
  misc_feature: 786 for SV(C|O) and mtDNA
gttggcatctgctcgggcgtatcatcaactgatgagcaagaaggatataattcctacgccctctcagccgatgaacagttggaataggttgttagcggtaactaagattagtatggtaat

SEQ ID NO: 69352 - DNA, 120 bp, Homo sapiens
  misc_feature: 786 for SV(C|O) and mtDNA
aaacgaatgatttcgactcattaaattatgataatcatatttaccaaatgcccctcatttacataaatattatactagcatttaccatctcacttctaggaatactagtataccgctcac

SEQ ID NO: 69353 - DNA, 120 bp, Homo sapiens
  misc_feature: 786 for SV(C|O) and mtDNA
atggattttggcgtaggtttggtctagggtgtagcctgagaataggggaaatcagtgaatgaagcctcctatgatggcaaatacagctcctattgataggacatagtggaagtgagctac

SEQ ID NO: 69354 - DNA, 120 bp, Homo sapiens
  misc_feature: 786 for SV(C|O) and mtDNA
gagggatgatgctaataattaggctgtgggtggttgtgttgattcaaattatgtgttttttggaaagtcatgtcagtggtagtaatataattgttgggacgattagttttagcattggag

SEQ ID NO: 69355 - DNA, 120 bp, Homo sapiens
  misc_feature: 786 for SV(C|O) and mtDNA
gaaatcattcgttttgtttaaactatataccaattcggttcagtctaatcctttttgtagtcactcataggccagacttagggctaggatgatgattaataagagggatgacataactat

SEQ ID NO: 69356 - DNA, 120 bp, Homo sapiens
  misc_feature: 786 for SV(C|O) and mtDNA
ctagccccaaacccactccaccttactaccagacaaccttagccaaaccatttacccaaataaagtataggcgatagaaattgaaacctggcgcaatagatatagtaccgcaagggaaag

SEQ ID NO: 69357 - DNA, 120 bp, Homo sapiens; identical to SEQ ID NO: 51797
  misc_feature: 786 for SV(C|O) and mtDNA

SEQ ID NO: 69358 - DNA, 120 bp, Homo sapiens
  misc_feature: 786 for SV(C|O) and mtDNA
ccaaatatctcatcaacaaccgactaatcaccacccaacaatgactaatcaaactaacctcaaaacaaatgataaccatacacaacactaaaggacgaacctgatctcttatactagtat

SEQ ID NO: 69359 - DNA, 120 bp, Homo sapiens; identical to SEQ ID NO: 54133
  misc_feature: 786 for SV(C|O) and mtDNA

SEQ ID NO: 69360 - DNA, 120 bp, Homo sapiens
  misc_feature: 786 for SV(C|O) and mtDNA
actatataccaattcggttcagtctaatcctttttgtagtcactcataggccagacttagggctaggatgatgattaataagagggatgacataactattagtggtaggttagttgtttg

SEQ ID NO: 69361 - DNA, 120 bp, Homo sapiens; identical to SEQ ID NO: 52236
  misc_feature: 786 for SV(C|O) and mtDNA

SEQ ID NO: 69362 - DNA, 120 bp, Homo sapiens; identical to SEQ ID NO: 54429
  misc_feature: 786 for SV(C|O) and mtDNA

SEQ ID NO: 69363 - DNA, 120 bp, Homo sapiens; identical to SEQ ID NO: 53755
  misc_feature: 785 for SV(C|O) and mtDNA

SEQ ID NO: 69364 - DNA, 120 bp, Homo sapiens
  misc_feature: 785 for SV(C|O) and mtDNA
ttttaatcttagagcgaaagcctataatcactgcgcccgctcataaggggatggccatggctaggtttatagatagttgggtggttggtgtaaatgagtgaggcaggagtccgaggaggt

SEQ ID NO: 69365 - DNA, 120 bp, Homo sapiens; identical to SEQ ID NO: 59252
  misc_feature: 785 for SV(C|O) and mtDNA

SEQ ID NO: 69366 - DNA, 120 bp, Homo sapiens; identical to SEQ ID NO: 59928
  misc_feature: 785 for SV(C|O) and mtDNA

SEQ ID NO: 69367 - DNA, 120 bp, Homo sapiens; identical to SEQ ID NO: 54879
  misc_feature: 785 for SV(C|O) and mtDNA

SEQ ID NO: 69368 - DNA, 120 bp, Homo sapiens
  misc_feature: 785 for SV(C|O) and mtDNA
agctggtttcaagccaaccccatggcctccatgactttttcaaaaaggtattagaaaaaccatttcataactttgtcaaagttaaattataggctaaatcctatatatcttaatggcaca

SEQ ID NO: 69369 - DNA, 120 bp, Homo sapiens
  misc_feature: 785 for SV(C|O) and mtDNA
ctagttttgacaacattcaaaaaagagtaataaacttcgccttaattttaataatcaacaccctcctagccttactactaataattattacattttgactaccacaactcaacggctaca

SEQ ID NO: 69370 - DNA, 120 bp, Homo sapiens
  misc_feature: 785 for SV(C|O) and mtDNA
tggttgtagtccgtgcgagaataatgatgtatgctttgtttctgttgagtgtgggtttagtaatggggtttgtggggttttcttctaagccttctcctatttatgggggtttagtattga

SEQ ID NO: 69371 - DNA, 120 bp, Homo sapiens
  misc_feature: 785 for SV(C|O) and mtDNA
aatcccaaacatataactgaactcctcacacccaattggaccaatctatcaccctatagaagaactaatgttagtataagtaacatgaaaacattctcctccgcataagcctgcgtcaga

SEQ ID NO: 69372 - DNA, 120 bp, Homo sapiens
  misc_feature: 785 for SV(C|O) and mtDNA
ctagtaggctcccttcccctactcatcgcactaatttacactcacaacaccctaggctcactaaacattctactactcactctcactgcccaagaactatcaaactcctgagccaacaac

SEQ ID NO: 69373 - DNA, 120 bp, Homo sapiens
  misc_feature: 785 for SV(C|O) and mtDNA
gttgagaatgagtgtgaggcgtattataccatagccgcctagttttaagagtactgcggcaagtactattgacccagcgatgggggcttcgacatgggctttagggagtcataagtggag

SEQ ID NO: 69374 - DNA, 120 bp, Homo sapiens; identical to SEQ ID NO: 56945
  misc_feature: 785 for SV(C|O) and mtDNA

SEQ ID NO: 69375 - DNA, 120 bp, Homo sapiens; identical to SEQ ID NO: 60387
  misc_feature: 785 for SV(C|O) and mtDNA

SEQ ID NO: 69376 - DNA, 120 bp, Homo sapiens
  misc_feature: 785 for SV(C|O) and mtDNA
ggtcaagttattggatcaattgagtatagtagttcgctttgactggtgaagtcttagcatgtactgctcggaggttgggttctgctccgaggtcgccccaaccgaaatttttaatgcagg

SEQ ID NO: 69377 - DNA, 120 bp, Homo sapiens
  misc_feature: 785 for SV(C|O) and mtDNA
attttaataatcaacaccctcctagccttactactaataattattacattttgactaccacaactcaacggctacatagaaaaatccaccccttacgagtgcggcttcgaccctatatcc

SEQ ID NO: 69378 - DNA, 120 bp, Homo sapiens
  misc_feature: 785 for SV(C|O) and mtDNA
gagaatgagtgtgaggcgtattataccatagccgcctagttttaagagtactgcggcaagtactattgacccagcgatgggggcttcgacatgggctttagggagtcataagtggagtcc

SEQ ID NO: 69379 - DNA, 120 bp, Homo sapiens
  misc_feature: 785 for SV(C|O) and mtDNA
gagtgtgaggcgtattataccatagccgcctagttttaagagtactgcggcaagtactattgacccagcgatgggggcttcgacatgggctttagggagtcataagtggagtccgtaaag

SEQ ID NO: 69380 - DNA, 120 bp, Homo sapiens; identical to SEQ ID NO: 53928
  misc_feature: 785 for SV(C|O) and mtDNA

SEQ ID NO: 69381 - DNA, 120 bp, Homo sapiens
  misc_feature: 785 for SV(C|O) and mtDNA
gaatgagtgtgaggcgtattataccatagccgcctagttttaagagtactgcggcaagtactattgacccagcgatgggggcttcgacatgggctttagggagtcataagtggagtccgt

SEQ ID NO: 69382 - DNA, 120 bp, Homo sapiens
  misc_feature: 785 for SV(C|O) and mtDNA
cagttcagtgttttaatctgacgcaggcttatgcggaggagaatgttttcatgttacttatactaacattagttcttctatagggtgatagattggtccaattgggtgtgaggagttcag

SEQ ID NO: 69383 - DNA, 120 bp, Homo sapiens
  misc_feature: 785 for SV(C|O) and mtDNA
aatcttagagcgaaagcctataatcactgcgcccgctcataaggggatggccatggctaggtttatagatagttgggtggttggtgtaaatgagtgaggcaggagtccgaggaggttagt

SEQ ID NO: 69384 - DNA, 120 bp, Homo sapiens; identical to SEQ ID NO: 52212
  misc_feature: 784 for SV(C|O) and mtDNA

SEQ ID NO: 69385 - DNA, 120 bp, Homo sapiens
  misc_feature: 784 for SV(C|O) and mtDNA
aaaatgacagtttgaacatacaaaacccaccccattcctccccacactcatcgcccttaccacgctactcctacctatctccccttttatactaataatcttatagaaatttaggttaaa

SEQ ID NO: 69386 - DNA, 120 bp, Homo sapiens
  misc_feature: 784 for SV(C|O) and mtDNA
tgttgtcgtgcaggtagaggcttactagaagtgtgaaaacgtaggcttggattaaggcgacagcgatttctaggatagtcagtagaattagaattgtgaagatgataagtgtagagggaa

SEQ ID NO: 69387 - DNA, 120 bp, Homo sapiens; identical to SEQ ID NO: 52953
  misc_feature: 784 for SV(C|O) and mtDNA

SEQ ID NO: 69388 - DNA, 120 bp, Homo sapiens
  misc_feature: 784 for SV(C|O) and mtDNA
gaattgtgaagatgataagtgtagagggaaggttaatggttgatattgctagggtggcgcttccaattaggtgcatgagtaggtggcctgcagtaatgttagcggttaggcgtacggcca

SEQ ID NO: 69389 - DNA, 120 bp, Homo sapiens
  misc_feature: 784 for SV(C|O) and mtDNA
tgctgttaagggtgagtaggtttgttggtatcctagtgggtgaggggtggctttggagttgcagttgatgtgtgatagttgagggttgattgctgtacttgcttgtaagcatggggaggg

SEQ ID NO: 69390 - DNA, 120 bp, Homo sapiens; identical to SEQ ID NO: 56142
  misc_feature: 784 for SV(C|O) and mtDNA

SEQ ID NO: 69391 - DNA, 120 bp, Homo sapiens
  misc_feature: 784 for SV(C|O) and mtDNA
agaacccgtatacataaaatctagacaaaaaaggaaggaatcgaaccccccaaagctggtttcaagccaaccccatggcctccatgactttttcaaaaaggtattagaaaaaccatttca

SEQ ID NO: 69392 - DNA, 120 bp, Homo sapiens
  misc_feature: 784 for SV(C|O) and mtDNA
tgaaacctggcgcaatagatatagtaccgcaagggaaagatgaaaaattataaccaagcataatacagcaaggactaacccctataccttctgcataatgaattaactagaaataacttt

SEQ ID NO: 69393 - DNA, 120 bp, Homo sapiens
  misc_feature: 784 for SV(C|O) and mtDNA
tcctgcctcactcatttacaccaaccacccaactatctataaacctagccatggccatccccttatgagcgggcgcagtgattataggctttcgctctaagattaaaaatgccctagccc

SEQ ID NO: 69394 - DNA, 120 bp, Homo sapiens
  misc_feature: 784 for SV(C|O) and mtDNA
taggatagtcagtagaattagaattgtgaagatgataagtgtagagggaaggttaatggttgatattgctagggtggcgcttccaattaggtgcatgagtaggtggcctgcagtaatgtt

SEQ ID NO: 69395 - DNA, 120 bp, Homo sapiens
  misc_feature: 784 for SV(C|O) and mtDNA
gcgtaggtttggtctagggtgtagcctgagaataggggaaatcagtgaatgaagcctcctatgatggcaaatacagctcctattgataggacatagtggaagtgagctacaacgtagtac

SEQ ID NO: 69396 - DNA, 120 bp, Homo sapiens
  misc_feature: 784 for SV(C|O) and mtDNA
ggagtgactatatggatgccccccaccctaccacacattcgaagaacccgtatacataaaatctagacaaaaaaggaaggaatcgaaccccccaaagctggtttcaagccaaccccatgg

SEQ ID NO: 69397 - DNA, 120 bp, Homo sapiens
  misc_feature: 784 for SV(C|O) and mtDNA
gaatgatggttgtctttggatatactacagcgatggctattgaggagtatcctgaggcatgggggtcaggggttgaggtcttggtgagtgttttagtggggttagcgatggaggtaggat

SEQ ID NO: 69398 - DNA, 120 bp, Homo sapiens; identical to SEQ ID NO: 52945
  misc_feature: 784 for SV(C|O) and mtDNA

SEQ ID NO: 69399 - DNA, 120 bp, Homo sapiens
  misc_feature: 784 for SV(C|O) and mtDNA
agaatgagtgtgaggcgtattataccatagccgcctagttttaagagtactgcggcaagtactattgacccagcgatgggggcttcgacatgggctttagggagtcataagtggagtccg

SEQ ID NO: 69400 - DNA, 120 bp, Homo sapiens; identical to SEQ ID NO: 54825
  misc_feature: 784 for SV(C|O) and mtDNA

SEQ ID NO: 69401 - DNA, 120 bp, Homo sapiens; identical to SEQ ID NO: 51975
  misc_feature: 784 for SV(C|O) and mtDNA

SEQ ID NO: 69402 - DNA, 120 bp, Homo sapiens
  misc_feature: 783 for SV(C|O) and mtDNA
aactattaaacccatataacctcccccaaaattcagaataataacacacccgaccacaccgctaacaatcaatactaaacccccataaataggagaaggcttagaagaaaaccccacaaa

SEQ ID NO: 69403 - DNA, 120 bp, Homo sapiens
  misc_feature: 783 for SV(C|O) and mtDNA
aggatgtttcatgtggtgtatgcatcggggtagtccgagtaacgtcggggcattccggataggccgagaaagtgttgtgggaagaaagttagatttacgccgatgaatatgatagtgaaa

SEQ ID NO: 69404 - DNA, 120 bp, Homo sapiens
  misc_feature: 783 for SV(C|O) and mtDNA
tttatggtaccgtacaatattcatggtggctggcagtaatgtacgaattacatagcggttgttgatgggtgagtcaatacttgggtggcacccaaatctgcttccccatgaaagaacaga

SEQ ID NO: 69405 - DNA, 120 bp, Homo sapiens
  misc_feature: 783 for SV(C|O) and mtDNA
atccacctttattatcagtctcttccccacaacaatattcatgtgcctagaccaagaagttattatctcgaactgacactgagccacaacccaaacaacccagctctccctaagcttcaa

SEQ ID NO: 69406 - DNA, 120 bp, Homo sapiens
  misc_feature: 783 for SV(C|O) and mtDNA
aagaaaaccccacaaaccccattactaaacccacactcaacagaaacaaagcatacatcattattctcgcacggactacaaccacgaccaatgatatgaaaaaccatcgttgtatttcaa

SEQ ID NO: 69407 - DNA, 120 bp, Homo sapiens
  misc_feature: 783 for SV(C|O) and mtDNA
ttcagtgttttaatctgacgcaggcttatgcggaggagaatgttttcatgttacttatactaacattagttcttctatagggtgatagattggtccaattgggtgtgaggagttcagtta

SEQ ID NO: 69408 - DNA, 120 bp, Homo sapiens
  misc_feature: 783 for SV(C|O) and mtDNA
atgagtgtgaggcgtattataccatagccgcctagttttaagagtactgcggcaagtactattgacccagcgatgggggcttcgacatgggctttagggagtcataagtggagtccgtaa

SEQ ID NO: 69409 - DNA, 120 bp, Homo sapiens
  misc_feature: 783 for SV(C|O) and mtDNA
tgtggggttttcttctaagccttctcctatttatgggggtttagtattgattgttagcggtgtggtcgggtgtgttattattctgaattttgggggaggttatatgggtttaatagtttt

SEQ ID NO: 69410 - DNA, 120 bp, Homo sapiens
  misc_feature: 783 for SV(C|O) and mtDNA
taagagatcaggttcgtcctttagtgttgtgtatggttatcatttgttttgaggttagtttgattagtcattgttgggtggtgattagtcggttgttgatgagatatttggaggtgggga

SEQ ID NO: 69411 - DNA, 120 bp, Homo sapiens
  misc_feature: 783 for SV(C|O) and mtDNA
tccaaatatctcatcaacaaccgactaatcaccacccaacaatgactaatcaaactaacctcaaaacaaatgataaccatacacaacactaaaggacgaacctgatctcttatactagta

SEQ ID NO: 69412 - DNA, 120 bp, Homo sapiens
  misc_feature: 783 for SV(C|O) and mtDNA
tattaaacccatataacctcccccaaaattcagaataataacacacccgaccacaccgctaacaatcaatactaaacccccataaataggagaaggcttagaagaaaaccccacaaaccc

SEQ ID NO: 69413 - DNA, 120 bp, Homo sapiens
  misc_feature: 783 for SV(C|O) and mtDNA
atggagacatacagaaatagtcaaaccacgtctacaaaatgccagtatcaggcggcggcttcgaagccaaagtgatgtttggatgtaaagtgaaatattagttggcggatgaagcagata

SEQ ID NO: 69414 - DNA, 120 bp, Homo sapiens
  misc_feature: 783 for SV(C|O) and mtDNA
acctccaaatatctcatcaacaaccgactaatcaccacccaacaatgactaatcaaactaacctcaaaacaaatgataaccatacacaacactaaaggacgaacctgatctcttatacta

SEQ ID NO: 69415 - DNA, 120 bp, Homo sapiens
  misc_feature: 783 for SV(C|O) and mtDNA
tacctccatcgctaaccccactaaaacactcaccaagacctcaacccctgacccccatgcctcaggatactcctcaatagccatcgctgtagtatatccaaagacaaccatcattccccc

SEQ ID NO: 69416 - DNA, 120 bp, Homo sapiens
  misc_feature: 783 for SV(C|O) and mtDNA
taaaactaatcgtcccaacaattatattactaccactgacatgactttccaaaaaacacataatttgaatcaacacaaccacccacagcctaattattagcatcatccctctactatttt

SEQ ID NO: 69417 - DNA, 120 bp, Homo sapiens
  misc_feature: 783 for SV(C|O) and mtDNA
gtcgaaatcattcgttttgtttaaactatataccaattcggttcagtctaatcctttttgtagtcactcataggccagacttagggctaggatgatgattaataagagggatgacataac

SEQ ID NO: 69418 - DNA, 120 bp, Homo sapiens
  misc_feature: 783 for SV(C|O) and mtDNA
gtcaagttattggatcaattgagtatagtagttcgctttgactggtgaagtcttagcatgtactgctcggaggttgggttctgctccgaggtcgccccaaccgaaatttttaatgcaggt

SEQ ID NO: 69419 - DNA, 120 bp, Homo sapiens
  misc_feature: 783 for SV(C|O) and mtDNA
atgacagtttgaacatacaaaacccaccccattcctccccacactcatcgcccttaccacgctactcctacctatctccccttttatactaataatcttatagaaatttaggttaaatac

SEQ ID NO: 69420 - DNA, 120 bp, Homo sapiens; identical to SEQ ID NO: 56234
  misc_feature: 783 for SV(C|O) and mtDNA

SEQ ID NO: 69421 - DNA, 120 bp, Homo sapiens
  misc_feature: 783 for SV(C|O) and mtDNA
gatgagtaggggaagggagcctactagggtgtagaataggaagtatgtgcctgcgttcaggcgttctggctggttgcctcatcgggtgatgatagccaaggtggggataagtgtggtttc

SEQ ID NO: 69422 - DNA, 120 bp, Homo sapiens; identical to SEQ ID NO: 56772
  misc_feature: 783 for SV(C|O) and mtDNA

SEQ ID NO: 69423 - DNA, 120 bp, Homo sapiens
  misc_feature: 783 for SV(C|O) and mtDNA
ctatatggatgccccccaccctaccacacattcgaagaacccgtatacataaaatctagacaaaaaaggaaggaatcgaaccccccaaagctggtttcaagccaaccccatggcctccat

SEQ ID NO: 69424 - DNA, 120 bp, Homo sapiens; identical to SEQ ID NO: 55558
  misc_feature: 783 for SV(C|O) and mtDNA

SEQ ID NO: 69425 - DNA, 120 bp, Homo sapiens
  misc_feature: 783 for SV(C|O) and mtDNA
atctcttatactagtatccttaatcatttttattgccacaactaacctcctcggactcctgcctcactcatttacaccaaccacccaactatctataaacctagccatggccatcccctt

SEQ ID NO: 69426 - DNA, 120 bp, Homo sapiens
  misc_feature: 783 for SV(C|O) and mtDNA
agagtacttcgagtctcccttcaccatttccgacggcatctacggctcaacattttttgtagccacaggcttccacggacttcacgtcattattggctcaactttcctcactatctgctt

SEQ ID NO: 69427 - DNA, 120 bp, Homo sapiens
  misc_feature: 783 for SV(C|O) and mtDNA
aaatcattcgttttgtttaaactatataccaattcggttcagtctaatcctttttgtagtcactcataggccagacttagggctaggatgatgattaataagagggatgacataactatt

SEQ ID NO: 69428 - DNA, 120 bp, Homo sapiens; identical to SEQ ID NO: 52102
  misc_feature: 782 for SV(C|O) and mtDNA

SEQ ID NO: 69429 - DNA, 120 bp, Homo sapiens
  misc_feature: 782 for SV(C|O) and mtDNA
ccaattaactagttttgacaacattcaaaaaagagtaataaacttcgccttaattttaataatcaacaccctcctagccttactactaataattattacattttgactaccacaactcaa

SEQ ID NO: 69430 - DNA, 120 bp, Homo sapiens
  misc_feature: 782 for SV(C|O) and mtDNA
atggtaccgtacaatattcatggtggctggcagtaatgtacgaattacatagcggttgttgatgggtgagtcaatacttgggtggcacccaaatctgcttccccatgaaagaacagagaa

SEQ ID NO: 69431 - DNA, 120 bp, Homo sapiens
  misc_feature: 782 for SV(C|O) and mtDNA
ttcgaatttgcaattcaatatgaaaatcacctcggagctggtaaaaagaggcctaacccctgtctttagatttacagtccaatgcttcactcagccattttacctcacccccactgatgt

SEQ ID NO: 69432 - DNA, 120 bp, Homo sapiens; identical to SEQ ID NO: 54144
  misc_feature: 782 for SV(C|O) and mtDNA

SEQ ID NO: 69433 - DNA, 120 bp, Homo sapiens
  misc_feature: 782 for SV(C|O) and mtDNA
tcacctcggagctggtaaaaagaggcctaacccctgtctttagatttacagtccaatgcttcactcagccattttacctcacccccactgatgttcgccgaccgttgactattctctaca

SEQ ID NO: 69434 - DNA, 120 bp, Homo sapiens; identical to SEQ ID NO: 56574
  misc_feature: 782 for SV(C|O) and mtDNA

SEQ ID NO: 69435 - DNA, 120 bp, Homo sapiens; identical to SEQ ID NO: 55703
  misc_feature: 782 for SV(C|O) and mtDNA

SEQ ID NO: 69436 - DNA, 120 bp, Homo sapiens; identical to SEQ ID NO: 52367
  misc_feature: 782 for SV(C|O) and mtDNA

SEQ ID NO: 69437 - DNA, 120 bp, Homo sapiens
  misc_feature: 782 for SV(C|O) and mtDNA
taccgtacaatattcatggtggctggcagtaatgtacgaattacatagcggttgttgatgggtgagtcaatacttgggtggcacccaaatctgcttccccatgaaagaacagagaatagt

SEQ ID NO: 69438 - DNA, 120 bp, Homo sapiens; identical to SEQ ID NO: 52650
  misc_feature: 782 for SV(C|O) and mtDNA

SEQ ID NO: 69439 - DNA, 120 bp, Homo sapiens
  misc_feature: 782 for SV(C|O) and mtDNA
gtggaagcctgtggctacaaaaaatgttgagccgtagatgccgtcggaaatggtgaagggagactcgaagtactctgaggcttgtaggagggtaaaatagagacccagtaaaattgtaat

SEQ ID NO: 69440 - DNA, 120 bp, Homo sapiens
  misc_feature: 782 for SV(C|O) and mtDNA
gtagtttgtgtttaatatttttagttgggtgatgaggaatagtgtaaggagtatgggggtaattatggtgggccatacggtagtatttagttggggcatttcactgtaaagaggtgttgg

SEQ ID NO: 69441 - DNA, 120 bp, Homo sapiens; identical to SEQ ID NO: 57308
  misc_feature: 782 for SV(C|O) and mtDNA

SEQ ID NO: 69442 - DNA, 120 bp, Homo sapiens
  misc_feature: 782 for SV(C|O) and mtDNA
ggatttttctgagccttttaccactccagcctagcccctaccccccaattaggagggcactggcccccaacaggcatcaccccgctaaatcccctagaagtcccactcctaaacacatcc

SEQ ID NO: 69443 - DNA, 120 bp, Homo sapiens; identical to SEQ ID NO: 54910
  misc_feature: 782 for SV(C|O) and mtDNA

SEQ ID NO: 69444 - DNA, 120 bp, Homo sapiens
  misc_feature: 782 for SV(C|O) and mtDNA
aataatcaacaccctcctagccttactactaataattattacattttgactaccacaactcaacggctacatagaaaaatccaccccttacgagtgcggcttcgaccctatatcccccgc

SEQ ID NO: 69445 - DNA, 120 bp, Homo sapiens
  misc_feature: 782 for SV(C|O) and mtDNA
ataggattatcccgtatcgaaggcctttttggacaggtggtgtgtggtggccttggtatgtgctttctcgtgttacatcgcgccatcattggtatatggttagtgtgttggttagtaggc

SEQ ID NO: 69446 - DNA, 120 bp, Homo sapiens; identical to SEQ ID NO: 52666
  misc_feature: 782 for SV(C|O) and mtDNA

SEQ ID NO: 69447 - DNA, 120 bp, Homo sapiens
  misc_feature: 782 for SV(C|O) and mtDNA
accatcgggatgtcctgatccaacatcgaggtcgtaaaccctattgttgatatggactctagaataggattgcgctgttatccctagggtaacttgttccgttggtcaagttattggatc

SEQ ID NO: 69448 - DNA, 120 bp, Homo sapiens
  misc_feature: 782 for SV(C|O) and mtDNA
gaacagtgatagtattattccttctaggcatagtagggaggatatgaggtgtgagcggtatactagtattcctagaagtgagatggtaaatgctagtataatatttatgtaaatgagggg

SEQ ID NO: 69449 - DNA, 120 bp, Homo sapiens
  misc_feature: 782 for SV(C|O) and mtDNA
ctcagagtacttcgagtctcccttcaccatttccgacggcatctacggctcaacattttttgtagccacaggcttccacggacttcacgtcattattggctcaactttcctcactatctg

SEQ ID NO: 69450 - DNA, 120 bp, Homo sapiens
  misc_feature: 782 for SV(C|O) and mtDNA
atgggctttggtgagggaggtaggtggtagtttgtgtttaatatttttagttgggtgatgaggaatagtgtaaggagtatgggggtaattatggtgggccatacggtagtatttagttgg

SEQ ID NO: 69451 - DNA, 120 bp, Homo sapiens
  misc_feature: 782 for SV(C|O) and mtDNA
cagagtacttcgagtctcccttcaccatttccgacggcatctacggctcaacattttttgtagccacaggcttccacggacttcacgtcattattggctcaactttcctcactatctgct

SEQ ID NO: 69452 - DNA, 120 bp, Homo sapiens
  misc_feature: 782 for SV(C|O) and mtDNA
atcgggatgtcctgatccaacatcgaggtcgtaaaccctattgttgatatggactctagaataggattgcgctgttatccctagggtaacttgttccgttggtcaagttattggatcaat

SEQ ID NO: 69453 - DNA, 120 bp, Homo sapiens
  misc_feature: 782 for SV(C|O) and mtDNA
agggatgatgctaataattaggctgtgggtggttgtgttgattcaaattatgtgttttttggaaagtcatgtcagtggtagtaatataattgttgggacgattagttttagcattggagt

SEQ ID NO: 69454 - DNA, 120 bp, Homo sapiens
  misc_feature: 781 for SV(C|O) and mtDNA
ttttggggcctaagaccaatggatagctgttatcctttaaaagttgagaaagccatgttgttagacatgggggcatgagttagcagttcttgtgagctttctcggtaaataaggggtcgt

SEQ ID NO: 69455 - DNA, 120 bp, Homo sapiens
  misc_feature: 781 for SV(C|O) and mtDNA
tttggggcctaagaccaatggatagctgttatcctttaaaagttgagaaagccatgttgttagacatgggggcatgagttagcagttcttgtgagctttctcggtaaataaggggtcgta

SEQ ID NO: 69456 - DNA, 120 bp, Homo sapiens; identical to SEQ ID NO: 54830
  misc_feature: 781 for SV(C|O) and mtDNA

SEQ ID NO: 69457 - DNA, 120 bp, Homo sapiens
  misc_feature: 781 for SV(C|O) and mtDNA
ttgtggggttttcttctaagccttctcctatttatgggggtttagtattgattgttagcggtgtggtcgggtgtgttattattctgaattttgggggaggttatatgggtttaatagttt

SEQ ID NO: 69458 - DNA, 120 bp, Homo sapiens
  misc_feature: 781 for SV(C|O) and mtDNA
gtaggtgcgataaataataggatgaggcaggaatcaaagacagatactgcgacatagggtgctccggctccagcgtctcgcaatgctatcgcgtgcacaccccccagacgaaaataccaa

SEQ ID NO: 69459 - DNA, 120 bp, Homo sapiens
  misc_feature: 781 for SV(C|O) and mtDNA
ttgagaatgagtgtgaggcgtattataccatagccgcctagttttaagagtactgcggcaagtactattgacccagcgatgggggcttcgacatgggctttagggagtcataagtggagt

SEQ ID NO: 69460 - DNA, 120 bp, Homo sapiens
  misc_feature: 781 for SV(C|O) and mtDNA
ttcatgttacttatactaacattagttcttctatagggtgatagattggtccaattgggtgtgaggagttcagttatatgtttgggattttttaggtagtgggtgttgagcttgaacgct

SEQ ID NO: 69461 - DNA, 120 bp, Homo sapiens; identical to SEQ ID NO: 56187
  misc_feature: 781 for SV(C|O) and mtDNA

SEQ ID NO: 69462 - DNA, 120 bp, Homo sapiens
  misc_feature: 781 for SV(C|O) and mtDNA
ttaatcttagagcgaaagcctataatcactgcgcccgctcataaggggatggccatggctaggtttatagatagttgggtggttggtgtaaatgagtgaggcaggagtccgaggaggtta

SEQ ID NO: 69463 - DNA, 120 bp, Homo sapiens; identical to SEQ ID NO: 54918
  misc_feature: 781 for SV(C|O) and mtDNA

SEQ ID NO: 69464 - DNA, 120 bp, Homo sapiens
  misc_feature: 781 for SV(C|O) and mtDNA
gcaccatcgggatgtcctgatccaacatcgaggtcgtaaaccctattgttgatatggactctagaataggattgcgctgttatccctagggtaacttgttccgttggtcaagttattgga

SEQ ID NO: 69465 - DNA, 120 bp, Homo sapiens; identical to SEQ ID NO: 58317
  misc_feature: 781 for SV(C|O) and mtDNA

SEQ ID NO: 69466 - DNA, 120 bp, Homo sapiens
  misc_feature: 781 for SV(C|O) and mtDNA
cccacctccaaatatctcatcaacaaccgactaatcaccacccaacaatgactaatcaaactaacctcaaaacaaatgataaccatacacaacactaaaggacgaacctgatctcttata

SEQ ID NO: 69467 - DNA, 120 bp, Homo sapiens
  misc_feature: 781 for SV(C|O) and mtDNA
aatggattttggcgtaggtttggtctagggtgtagcctgagaataggggaaatcagtgaatgaagcctcctatgatggcaaatacagctcctattgataggacatagtggaagtgagcta

SEQ ID NO: 69468 - DNA, 120 bp, Homo sapiens
  misc_feature: 781 for SV(C|O) and mtDNA
aatgagtgtgaggcgtattataccatagccgcctagttttaagagtactgcggcaagtactattgacccagcgatgggggcttcgacatgggctttagggagtcataagtggagtccgta

SEQ ID NO: 69469 - DNA, 120 bp, Homo sapiens
  misc_feature: 781 for SV(C|O) and mtDNA
cccaaacatataactgaactcctcacacccaattggaccaatctatcaccctatagaagaactaatgttagtataagtaacatgaaaacattctcctccgcataagcctgcgtcagatta

SEQ ID NO: 69470 - DNA, 120 bp, Homo sapiens
  misc_feature: 781 for SV(C|O) and mtDNA
aggatagtcagtagaattagaattgtgaagatgataagtgtagagggaaggttaatggttgatattgctagggtggcgcttccaattaggtgcatgagtaggtggcctgcagtaatgtta

SEQ ID NO: 69471 - DNA, 120 bp, Homo sapiens
  misc_feature: 781 for SV(C|O) and mtDNA
gtgttttaatctgacgcaggcttatgcggaggagaatgttttcatgttacttatactaacattagttcttctatagggtgatagattggtccaattgggtgtgaggagttcagttatatg

SEQ ID NO: 69472 - DNA, 120 bp, Homo sapiens
  misc_feature: 781 for SV(C|O) and mtDNA
ccacctccaaatatctcatcaacaaccgactaatcaccacccaacaatgactaatcaaactaacctcaaaacaaatgataaccatacacaacactaaaggacgaacctgatctcttatac

SEQ ID NO: 69473 - DNA, 120 bp, Homo sapiens
  misc_feature: 781 for SV(C|O) and mtDNA
ggggaatgatggttgtctttggatatactacagcgatggctattgaggagtatcctgaggcatgggggtcaggggttgaggtcttggtgagtgttttagtggggttagcgatggaggtag

SEQ ID NO: 69474 - DNA, 120 bp, Homo sapiens
  misc_feature: 781 for SV(C|O) and mtDNA
aaagagttactttgatagagtaaataataggagcttaaacccccttatttctaggactatgagaatcgaacccatccctgagaatccaaaattctccgtgccacctatcacaccccatcc

SEQ ID NO: 69475 - DNA, 120 bp, Homo sapiens
  misc_feature: 781 for SV(C|O) and mtDNA
gctaaaactaatcgtcccaacaattatattactaccactgacatgactttccaaaaaacacataatttgaatcaacacaaccacccacagcctaattattagcatcatccctctactatt

SEQ ID NO: 69476 - DNA, 120 bp, Homo sapiens; identical to SEQ ID NO: 53044
  misc_feature: 781 for SV(C|O) and mtDNA

SEQ ID NO: 69477 - DNA, 120 bp, Homo sapiens
  misc_feature: 781 for SV(C|O) and mtDNA
gaggtaataaataggattatcccgtatcgaaggcctttttggacaggtggtgtgtggtggccttggtatgtgctttctcgtgttacatcgcgccatcattggtatatggttagtgtgttg

SEQ ID NO: 69478 - DNA, 120 bp, Homo sapiens; identical to SEQ ID NO: 53248
  misc_feature: 781 for SV(C|O) and mtDNA

SEQ ID NO: 69479 - DNA, 120 bp, Homo sapiens
  misc_feature: 781 for SV(C|O) and mtDNA
aattaactagttttgacaacattcaaaaaagagtaataaacttcgccttaattttaataatcaacaccctcctagccttactactaataattattacattttgactaccacaactcaacg

SEQ ID NO: 69480 - DNA, 120 bp, Homo sapiens; identical to SEQ ID NO: 54377
  misc_feature: 781 for SV(C|O) and mtDNA

SEQ ID NO: 69481 - DNA, 120 bp, Homo sapiens; identical to SEQ ID NO: 59474
  misc_feature: 781 for SV(C|O) and mtDNA

SEQ ID NO: 69482 - DNA, 120 bp, Homo sapiens; identical to SEQ ID NO: 57253
  misc_feature: 781 for SV(C|O) and mtDNA

SEQ ID NO: 69483 - DNA, 120 bp, Homo sapiens
  misc_feature: 781 for SV(C|O) and mtDNA
agtccgtggaagcctgtggctacaaaaaatgttgagccgtagatgccgtcggaaatggtgaagggagactcgaagtactctgaggcttgtaggagggtaaaatagagacccagtaaaatt

SEQ ID NO: 69484 - DNA, 120 bp, Homo sapiens
  misc_feature: 781 for SV(C|O) and mtDNA
acattaatcagttcttcaaatatctactcatcttcctaattaccatactaatcttagttaccgctaacaacctattccaactgttcatcggctgagagggcgtaggaattatatccttct

SEQ ID NO: 69485 - DNA, 120 bp, Homo sapiens
  misc_feature: 781 for SV(C|O) and mtDNA
aatgatggttgtctttggatatactacagcgatggctattgaggagtatcctgaggcatgggggtcaggggttgaggtcttggtgagtgttttagtggggttagcgatggaggtaggatt

SEQ ID NO: 69486 - DNA, 120 bp, Homo sapiens; identical to SEQ ID NO: 53817
  misc_feature: 780 for SV(C|O) and mtDNA

SEQ ID NO: 69487 - DNA, 120 bp, Homo sapiens; identical to SEQ ID NO: 60285
  misc_feature: 780 for SV(C|O) and mtDNA

SEQ ID NO: 69488 - DNA, 120 bp, Homo sapiens
  misc_feature: 780 for SV(C|O) and mtDNA
ttgtttaaactatataccaattcggttcagtctaatcctttttgtagtcactcataggccagacttagggctaggatgatgattaataagagggatgacataactattagtggtaggtta

SEQ ID NO: 69489 - DNA, 120 bp, Homo sapiens
  misc_feature: 780 for SV(C|O) and mtDNA
ttgaacatacaaaacccaccccattcctccccacactcatcgcccttaccacgctactcctacctatctccccttttatactaataatcttatagaaatttaggttaaatacagaccaag

SEQ ID NO: 69490 - DNA, 120 bp, Homo sapiens; identical to SEQ ID NO: 52352
  misc_feature: 780 for SV(C|O) and mtDNA

SEQ ID NO: 69491 - DNA, 120 bp, Homo sapiens; identical to SEQ ID NO: 53031
  misc_feature: 780 for SV(C|O) and mtDNA

SEQ ID NO: 69492 - DNA, 120 bp, Homo sapiens
  misc_feature: 780 for SV(C|O) and mtDNA
tccgttggtcaagttattggatcaattgagtatagtagttcgctttgactggtgaagtcttagcatgtactgctcggaggttgggttctgctccgaggtcgccccaaccgaaatttttaa

SEQ ID NO: 69493 - DNA, 120 bp, Homo sapiens
  misc_feature: 780 for SV(C|O) and mtDNA
tatttatggtaccgtacaatattcatggtggctggcagtaatgtacgaattacatagcggttgttgatgggtgagtcaatacttgggtggcacccaaatctgcttccccatgaaagaaca

SEQ ID NO: 69494 - DNA, 120 bp, Homo sapiens
  misc_feature: 780 for SV(C|O) and mtDNA
atttcctcacgcaagcaaccgcatccataatccttctaatagctatcctcttcaacaatatactctccggacaatgaaccataaccaatactaccaatcaatactcatcattaataatca

SEQ ID NO: 69495 - DNA, 120 bp, Homo sapiens
  misc_feature: 780 for SV(C|O) and mtDNA
tcttattatttgatctagaaattgccctccttttacccctaccatgagccctacaaacaactaacctaccactaatagttatgtcatccctcttattaatcatcatcctagccctaagtc

SEQ ID NO: 69496 - DNA, 120 bp, Homo sapiens
  misc_feature: 780 for SV(C|O) and mtDNA
atttaatgagtcgaaatcattcgttttgtttaaactatataccaattcggttcagtctaatcctttttgtagtcactcataggccagacttagggctaggatgatgattaataagaggga

SEQ ID NO: 69497 - DNA, 120 bp, Homo sapiens
  misc_feature: 780 for SV(C|O) and mtDNA
ggtaccgtacaatattcatggtggctggcagtaatgtacgaattacatagcggttgttgatgggtgagtcaatacttgggtggcacccaaatctgcttccccatgaaagaacagagaata

SEQ ID NO: 69498 - DNA, 120 bp, Homo sapiens
  misc_feature: 780 for SV(C|O) and mtDNA
acaccctaggctcactaaacattctactactcactctcactgcccaagaactatcaaactcctgagccaacaacttaatatgactagcttacacaatagcttttatagtaaagatacctc

SEQ ID NO: 69499 - DNA, 120 bp, Homo sapiens
  misc_feature: 780 for SV(C|O) and mtDNA
gaaaaccccacaaaccccattactaaacccacactcaacagaaacaaagcatacatcattattctcgcacggactacaaccacgaccaatgatatgaaaaaccatcgttgtatttcaact

SEQ ID NO: 69500 - DNA, 120 bp, Homo sapiens; identical to SEQ ID NO: 58275
  misc_feature: 780 for SV(C|O) and mtDNA

SEQ ID NO: 69501 - DNA, 120 bp, Homo sapiens
  misc_feature: 780 for SV(C|O) and mtDNA
caccatcgggatgtcctgatccaacatcgaggtcgtaaaccctattgttgatatggactctagaataggattgcgctgttatccctagggtaacttgttccgttggtcaagttattggat

SEQ ID NO: 69502 - DNA, 120 bp, Homo sapiens; identical to SEQ ID NO: 54562
  misc_feature: 780 for SV(C|O) and mtDNA

SEQ ID NO: 69503 - DNA, 120 bp, Homo sapiens
  misc_feature: 780 for SV(C|O) and mtDNA
atcccaaacatataactgaactcctcacacccaattggaccaatctatcaccctatagaagaactaatgttagtataagtaacatgaaaacattctcctccgcataagcctgcgtcagat

SEQ ID NO: 69504 - DNA, 120 bp, Homo sapiens
  misc_feature: 780 for SV(C|O) and mtDNA
agtgttttaatctgacgcaggcttatgcggaggagaatgttttcatgttacttatactaacattagttcttctatagggtgatagattggtccaattgggtgtgaggagttcagttatat

SEQ ID NO: 69505 - DNA, 120 bp, Homo sapiens
  misc_feature: 779 for SV(C|O) and mtDNA
gttgattagtagtagttactggttgaacattgtttgttggtgtatatattgtaattgagattgctcgggggaataggttatgtgattaggagtagggttaggatgagtgggaagaagaaa

SEQ ID NO: 69506 - DNA, 120 bp, Homo sapiens
  misc_feature: 779 for SV(C|O) and mtDNA
cctagtaggctcccttcccctactcatcgcactaatttacactcacaacaccctaggctcactaaacattctactactcactctcactgcccaagaactatcaaactcctgagccaacaa

SEQ ID NO: 69507 - DNA, 120 bp, Homo sapiens; identical to SEQ ID NO: 57737
  misc_feature: 779 for SV(C|O) and mtDNA

SEQ ID NO: 69508 - DNA, 120 bp, Homo sapiens; identical to SEQ ID NO: 57265
  misc_feature: 779 for SV(C|O) and mtDNA

SEQ ID NO: 69509 - DNA, 120 bp, Homo sapiens
  misc_feature: 779 for SV(C|O) and mtDNA
gaagaaaaccccacaaaccccattactaaacccacactcaacagaaacaaagcatacatcattattctcgcacggactacaaccacgaccaatgatatgaaaaaccatcgttgtatttca

SEQ ID NO: 69510 - DNA, 120 bp, Homo sapiens
  misc_feature: 779 for SV(C|O) and mtDNA
agtgtgaggcgtattataccatagccgcctagttttaagagtactgcggcaagtactattgacccagcgatgggggcttcgacatgggctttagggagtcataagtggagtccgtaaaga

SEQ ID NO: 69511 - DNA, 120 bp, Homo sapiens
  misc_feature: 779 for SV(C|O) and mtDNA
tatcacagtgagaattctatgatggaccatgtaacgaataatgctacagggatgaatattatggagaagtagtctagtttgaagcttagggagagctgggttgtttgggttgtggctcag

SEQ ID NO: 69512 - DNA, 120 bp, Homo sapiens
  misc_feature: 779 for SV(C|O) and mtDNA
cagtgttttaatctgacgcaggcttatgcggaggagaatgttttcatgttacttatactaacattagttcttctatagggtgatagattggtccaattgggtgtgaggagttcagttata

SEQ ID NO: 69513 - DNA, 120 bp, Homo sapiens
  misc_feature: 779 for SV(C|O) and mtDNA
gtaccgtacaatattcatggtggctggcagtaatgtacgaattacatagcggttgttgatgggtgagtcaatacttgggtggcacccaaatctgcttccccatgaaagaacagagaatag

SEQ ID NO: 69514 - DNA, 120 bp, Homo sapiens
  misc_feature: 779 for SV(C|O) and mtDNA
gggatttagcggggtgatgcctgttgggggccagtgccctcctaattggggggtaggggctaggctggagtggtaaaaggctcagaaaaatcctgcgaagaaaaaaacttctgaggtaat

SEQ ID NO: 69515 - DNA, 120 bp, Homo sapiens; identical to SEQ ID NO: 55676
  misc_feature: 779 for SV(C|O) and mtDNA

SEQ ID NO: 69516 - DNA, 120 bp, Homo sapiens
  misc_feature: 779 for SV(C|O) and mtDNA
ggcgtattataccatagccgcctagttttaagagtactgcggcaagtactattgacccagcgatgggggcttcgacatgggctttagggagtcataagtggagtccgtaaagaggtatct

SEQ ID NO: 69517 - DNA, 120 bp, Homo sapiens; identical to SEQ ID NO: 56057
  misc_feature: 779 for SV(C|O) and mtDNA

SEQ ID NO: 69518 - DNA, 120 bp, Homo sapiens
  misc_feature: 779 for SV(C|O) and mtDNA
gctgttaagggtgagtaggtttgttggtatcctagtgggtgaggggtggctttggagttgcagttgatgtgtgatagttgagggttgattgctgtacttgcttgtaagcatggggagggg

SEQ ID NO: 69519 - DNA, 120 bp, Homo sapiens
  misc_feature: 779 for SV(C|O) and mtDNA
agtaactcttttatcagacatatttcttaggtttgagggggaatgctggagattgtaatgggtatggagacatatcatataagtaatgctagggtgagtggtaggaagttttttcatagg

SEQ ID NO: 69520 - DNA, 120 bp, Homo sapiens
  misc_feature: 779 for SV(C|O) and mtDNA
ataaataggattatcccgtatcgaaggcctttttggacaggtggtgtgtggtggccttggtatgtgctttctcgtgttacatcgcgccatcattggtatatggttagtgtgttggttagt

SEQ ID NO: 69521 - DNA, 120 bp, Homo sapiens
  misc_feature: 778 for SV(C|O) and mtDNA
ttggcatctgctcgggcgtatcatcaactgatgagcaagaaggatataattcctacgccctctcagccgatgaacagttggaataggttgttagcggtaactaagattagtatggtaatt

SEQ ID NO: 69522 - DNA, 120 bp, Homo sapiens
  misc_feature: 778 for SV(C|O) and mtDNA
cgttgattagtagtagttactggttgaacattgtttgttggtgtatatattgtaattgagattgctcgggggaataggttatgtgattaggagtagggttaggatgagtgggaagaagaa

SEQ ID NO: 69523 - DNA, 120 bp, Homo sapiens; identical to SEQ ID NO: 58257
  misc_feature: 778 for SV(C|O) and mtDNA

SEQ ID NO: 69524 - DNA, 120 bp, Homo sapiens
  misc_feature: 778 for SV(C|O) and mtDNA
actttgatagagtaaataataggagcttaaacccccttatttctaggactatgagaatcgaacccatccctgagaatccaaaattctccgtgccacctatcacaccccatcctaaagtaa

SEQ ID NO: 69525 - DNA, 120 bp, Homo sapiens
  misc_feature: 778 for SV(C|O) and mtDNA
ttaaactttacttcctctctttcttcttcccactcatcctaaccctactcctaatcacataacctattcccccgagcaatctcaattacaatatatacaccaacaaacaatgttcaacca

SEQ ID NO: 69526 - DNA, 120 bp, Homo sapiens
  misc_feature: 778 for SV(C|O) and mtDNA
tgttttaatctgacgcaggcttatgcggaggagaatgttttcatgttacttatactaacattagttcttctatagggtgatagattggtccaattgggtgtgaggagttcagttatatgt

SEQ ID NO: 69527 - DNA, 120 bp, Homo sapiens; identical to SEQ ID NO: 54121
  misc_feature: 778 for SV(C|O) and mtDNA

SEQ ID NO: 69528 - DNA, 120 bp, Homo sapiens; identical to SEQ ID NO: 52150
  misc_feature: 778 for SV(C|O) and mtDNA

SEQ ID NO: 69529 - DNA, 120 bp, Homo sapiens; identical to SEQ ID NO: 53127
  misc_feature: 778 for SV(C|O) and mtDNA

SEQ ID NO: 69530 - DNA, 120 bp, Homo sapiens
  misc_feature: 778 for SV(C|O) and mtDNA
tagttttgacaacattcaaaaaagagtaataaacttcgccttaattttaataatcaacaccctcctagccttactactaataattattacattttgactaccacaactcaacggctacat

SEQ ID NO: 69531 - DNA, 120 bp, Homo sapiens; identical to SEQ ID NO: 57719
  misc_feature: 778 for SV(C|O) and mtDNA

SEQ ID NO: 69532 - DNA, 120 bp, Homo sapiens; identical to SEQ ID NO: 54257
  misc_feature: 778 for SV(C|O) and mtDNA

SEQ ID NO: 69533 - DNA, 120 bp, Homo sapiens
  misc_feature: 778 for SV(C|O) and mtDNA
atcacctcggagctggtaaaaagaggcctaacccctgtctttagatttacagtccaatgcttcactcagccattttacctcacccccactgatgttcgccgaccgttgactattctctac

SEQ ID NO: 69534 - DNA, 120 bp, Homo sapiens
  misc_feature: 778 for SV(C|O) and mtDNA
gggtgttgtgagtgtaaattagtgcgatgagtaggggaagggagcctactagggtgtagaataggaagtatgtgcctgcgttcaggcgttctggctggttgcctcatcgggtgatgatag

SEQ ID NO: 69535 - DNA, 120 bp, Homo sapiens
  misc_feature: 778 for SV(C|O) and mtDNA
gggaatgatggttgtctttggatatactacagcgatggctattgaggagtatcctgaggcatgggggtcaggggttgaggtcttggtgagtgttttagtggggttagcgatggaggtagg

SEQ ID NO: 69536 - DNA, 120 bp, Homo sapiens
  misc_feature: 778 for SV(C|O) and mtDNA
accacaccgctaacaatcaatactaaacccccataaataggagaaggcttagaagaaaaccccacaaaccccattactaaacccacactcaacagaaacaaagcatacatcattattctc

SEQ ID NO: 69537 - DNA, 120 bp, Homo sapiens; identical to SEQ ID NO: 58302
  misc_feature: 778 for SV(C|O) and mtDNA

SEQ ID NO: 69538 - DNA, 120 bp, Homo sapiens
  misc_feature: 778 for SV(C|O) and mtDNA
ccgtacaatattcatggtggctggcagtaatgtacgaattacatagcggttgttgatgggtgagtcaatacttgggtggcacccaaatctgcttccccatgaaagaacagagaatagttt

SEQ ID NO: 69539 - DNA, 120 bp, Homo sapiens
  misc_feature: 778 for SV(C|O) and mtDNA
ccccacctccaaatatctcatcaacaaccgactaatcaccacccaacaatgactaatcaaactaacctcaaaacaaatgataaccatacacaacactaaaggacgaacctgatctcttat

SEQ ID NO: 69540 - DNA, 120 bp, Homo sapiens
  misc_feature: 778 for SV(C|O) and mtDNA
aatatctcatcaacaaccgactaatcaccacccaacaatgactaatcaaactaacctcaaaacaaatgataaccatacacaacactaaaggacgaacctgatctcttatactagtatcct

SEQ ID NO: 69541 - DNA, 120 bp, Homo sapiens
  misc_feature: 778 for SV(C|O) and mtDNA
aaactttacttcctctctttcttcttcccactcatcctaaccctactcctaatcacataacctattcccccgagcaatctcaattacaatatatacaccaacaaacaatgttcaaccagt

SEQ ID NO: 69542 - DNA, 120 bp, Homo sapiens
  misc_feature: 778 for SV(C|O) and mtDNA
accgtacaatattcatggtggctggcagtaatgtacgaattacatagcggttgttgatgggtgagtcaatacttgggtggcacccaaatctgcttccccatgaaagaacagagaatagtt

SEQ ID NO: 69543 - DNA, 120 bp, Homo sapiens; identical to SEQ ID NO: 58134
  misc_feature: 777 for SV(C|O) and mtDNA

SEQ ID NO: 69544 - DNA, 120 bp, Homo sapiens
  misc_feature: 777 for SV(C|O) and mtDNA
tttcatgttacttatactaacattagttcttctatagggtgatagattggtccaattgggtgtgaggagttcagttatatgtttgggattttttaggtagtgggtgttgagcttgaacgc

SEQ ID NO: 69545 - DNA, 120 bp, Homo sapiens
  misc_feature: 777 for SV(C|O) and mtDNA
tttaatttattaatgcaaacagtacctaacaaacccacaggtcctaaactaccaaacctgcattaaaaatttcggttggggcgacctcggagcagaacccaacctccgagcagtacatgc

SEQ ID NO: 69546 - DNA, 120 bp, Homo sapiens
  misc_feature: 777 for SV(C|O) and mtDNA
taacttgttccgttggtcaagttattggatcaattgagtatagtagttcgctttgactggtgaagtcttagcatgtactgctcggaggttgggttctgctccgaggtcgccccaaccgaa

SEQ ID NO: 69547 - DNA, 120 bp, Homo sapiens; identical to SEQ ID NO: 53365
  misc_feature: 777 for SV(C|O) and mtDNA

SEQ ID NO: 69548 - DNA, 120 bp, Homo sapiens
  misc_feature: 777 for SV(C|O) and mtDNA
tggtgttcttgtagttgaaatacaacgatggtttttcatatcattggtcgtggttgtagtccgtgcgagaataatgatgtatgctttgtttctgttgagtgtgggtttagtaatggggtt

SEQ ID NO: 69549 - DNA, 120 bp, Homo sapiens
  misc_feature: 777 for SV(C|O) and mtDNA
tgaggtaataaataggattatcccgtatcgaaggcctttttggacaggtggtgtgtggtggccttggtatgtgctttctcgtgttacatcgcgccatcattggtatatggttagtgtgtt

SEQ ID NO: 69550 - DNA, 120 bp, Homo sapiens
  misc_feature: 777 for SV(C|O) and mtDNA
agttttgacaacattcaaaaaagagtaataaacttcgccttaattttaataatcaacaccctcctagccttactactaataattattacattttgactaccacaactcaacggctacata

SEQ ID NO: 69551 - DNA, 120 bp, Homo sapiens
  misc_feature: 777 for SV(C|O) and mtDNA
tatctcatcaacaaccgactaatcaccacccaacaatgactaatcaaactaacctcaaaacaaatgataaccatacacaacactaaaggacgaacctgatctcttatactagtatcctta

SEQ ID NO: 69552 - DNA, 120 bp, Homo sapiens
  misc_feature: 777 for SV(C|O) and mtDNA
agggtgttgtgagtgtaaattagtgcgatgagtaggggaagggagcctactagggtgtagaataggaagtatgtgcctgcgttcaggcgttctggctggttgcctcatcgggtgatgata

SEQ ID NO: 69553 - DNA, 120 bp, Homo sapiens; identical to SEQ ID NO: 54006
  misc_feature: 777 for SV(C|O) and mtDNA

SEQ ID NO: 69554 - DNA, 120 bp, Homo sapiens
  misc_feature: 777 for SV(C|O) and mtDNA
aatcacctcggagctggtaaaaagaggcctaacccctgtctttagatttacagtccaatgcttcactcagccattttacctcacccccactgatgttcgccgaccgttgactattctcta

SEQ ID NO: 69555 - DNA, 120 bp, Homo sapiens; identical to SEQ ID NO: 53486
  misc_feature: 777 for SV(C|O) and mtDNA

SEQ ID NO: 69556 - DNA, 120 bp, Homo sapiens
  misc_feature: 777 for SV(C|O) and mtDNA
gttttgacaacattcaaaaaagagtaataaacttcgccttaattttaataatcaacaccctcctagccttactactaataattattacattttgactaccacaactcaacggctacatag

SEQ ID NO: 69557 - DNA, 120 bp, Homo sapiens
  misc_feature: 777 for SV(C|O) and mtDNA
agaaaaccccacaaaccccattactaaacccacactcaacagaaacaaagcatacatcattattctcgcacggactacaaccacgaccaatgatatgaaaaaccatcgttgtatttcaac

SEQ ID NO: 69558 - DNA, 120 bp, Homo sapiens
  misc_feature: 777 for SV(C|O) and mtDNA
gttccgttggtcaagttattggatcaattgagtatagtagttcgctttgactggtgaagtcttagcatgtactgctcggaggttgggttctgctccgaggtcgccccaaccgaaattttt

SEQ ID NO: 69559 - DNA, 120 bp, Homo sapiens
  misc_feature: 777 for SV(C|O) and mtDNA
gtcagttcagtgttttaatctgacgcaggcttatgcggaggagaatgttttcatgttacttatactaacattagttcttctatagggtgatagattggtccaattgggtgtgaggagttc

SEQ ID NO: 69560 - DNA, 120 bp, Homo sapiens; identical to SEQ ID NO: 52005
  misc_feature: 777 for SV(C|O) and mtDNA

SEQ ID NO: 69561 - DNA, 120 bp, Homo sapiens
  misc_feature: 777 for SV(C|O) and mtDNA
ctattaaacccatataacctcccccaaaattcagaataataacacacccgaccacaccgctaacaatcaatactaaacccccataaataggagaaggcttagaagaaaaccccacaaacc

SEQ ID NO: 69562 - DNA, 120 bp, Homo sapiens
  misc_feature: 777 for SV(C|O) and mtDNA
ggtgttcttgtagttgaaatacaacgatggtttttcatatcattggtcgtggttgtagtccgtgcgagaataatgatgtatgctttgtttctgttgagtgtgggtttagtaatggggttt

SEQ ID NO: 69563 - DNA, 120 bp, Homo sapiens
  misc_feature: 777 for SV(C|O) and mtDNA
acttcgagtctcccttcaccatttccgacggcatctacggctcaacattttttgtagccacaggcttccacggacttcacgtcattattggctcaactttcctcactatctgcttcatcc

SEQ ID NO: 69564 - DNA, 120 bp, Homo sapiens
  misc_feature: 777 for SV(C|O) and mtDNA
agtctcttccccacaacaatattcatgtgcctagaccaagaagttattatctcgaactgacactgagccacaacccaaacaacccagctctccctaagcttcaaactagactacttctcc

SEQ ID NO: 69565 - DNA, 120 bp, Homo sapiens; identical to SEQ ID NO: 54846
  misc_feature: 777 for SV(C|O) and mtDNA

SEQ ID NO: 69566 - DNA, 120 bp, Homo sapiens
  misc_feature: 777 for SV(C|O) and mtDNA
caaatatctcatcaacaaccgactaatcaccacccaacaatgactaatcaaactaacctcaaaacaaatgataaccatacacaacactaaaggacgaacctgatctcttatactagtatc

SEQ ID NO: 69567 - DNA, 120 bp, Homo sapiens
  misc_feature: 777 for SV(C|O) and mtDNA
gactcctgcctcactcatttacaccaaccacccaactatctataaacctagccatggccatccccttatgagcgggcgcagtgattataggctttcgctctaagattaaaaatgccctag

SEQ ID NO: 69568 - DNA, 120 bp, Homo sapiens
  misc_feature: 777 for SV(C|O) and mtDNA
atttttggggcctaagaccaatggatagctgttatcctttaaaagttgagaaagccatgttgttagacatgggggcatgagttagcagttcttgtgagctttctcggtaaataaggggtc

SEQ ID NO: 69569 - DNA, 120 bp, Homo sapiens
  misc_feature: 777 for SV(C|O) and mtDNA
ctgtagcattattcgttacatggtccatcatagaattctcactgtgatatataaactcagacccaaacattaatcagttcttcaaatatctactcatcttcctaattaccatactaatct

SEQ ID NO: 69570 - DNA, 120 bp, Homo sapiens
  misc_feature: 777 for SV(C|O) and mtDNA
aagtaactcttttatcagacatatttcttaggtttgagggggaatgctggagattgtaatgggtatggagacatatcatataagtaatgctagggtgagtggtaggaagttttttcatag

SEQ ID NO: 69571 - DNA, 120 bp, Homo sapiens; identical to SEQ ID NO: 55731
  misc_feature: 777 for SV(C|O) and mtDNA

SEQ ID NO: 69572 - DNA, 120 bp, Homo sapiens
  misc_feature: 777 for SV(C|O) and mtDNA
agccccaaacccactccaccttactaccagacaaccttagccaaaccatttacccaaataaagtataggcgatagaaattgaaacctggcgcaatagatatagtaccgcaagggaaagat

SEQ ID NO: 69573 - DNA, 120 bp, Homo sapiens; identical to SEQ ID NO: 58673
  misc_feature: 777 for SV(C|O) and mtDNA

SEQ ID NO: 69574 - DNA, 120 bp, Homo sapiens
  misc_feature: 777 for SV(C|O) and mtDNA
aactatataccaattcggttcagtctaatcctttttgtagtcactcataggccagacttagggctaggatgatgattaataagagggatgacataactattagtggtaggttagttgttt

SEQ ID NO: 69575 - DNA, 120 bp, Homo sapiens
  misc_feature: 776 for SV(C|O) and mtDNA
aacttgttccgttggtcaagttattggatcaattgagtatagtagttcgctttgactggtgaagtcttagcatgtactgctcggaggttgggttctgctccgaggtcgccccaaccgaaa

SEQ ID NO: 69576 - DNA, 120 bp, Homo sapiens
  misc_feature: 776 for SV(C|O) and mtDNA
tgagtgtgaggcgtattataccatagccgcctagttttaagagtactgcggcaagtactattgacccagcgatgggggcttcgacatgggctttagggagtcataagtggagtccgtaaa

SEQ ID NO: 69577 - DNA, 120 bp, Homo sapiens
  misc_feature: 776 for SV(C|O) and mtDNA
tcctcacgcaagcaaccgcatccataatccttctaatagctatcctcttcaacaatatactctccggacaatgaaccataaccaatactaccaatcaatactcatcattaataatcataa

SEQ ID NO: 69578 - DNA, 120 bp, Homo sapiens; identical to SEQ ID NO: 60817
  misc_feature: 776 for SV(C|O) and mtDNA

SEQ ID NO: 69579 - DNA, 120 bp, Homo sapiens
  misc_feature: 776 for SV(C|O) and mtDNA
ccaatctatcaccctatagaagaactaatgttagtataagtaacatgaaaacattctcctccgcataagcctgcgtcagattaaaacactgaactgacaattaacagcccaatatctaca

SEQ ID NO: 69580 - DNA, 120 bp, Homo sapiens
  misc_feature: 776 for SV(C|O) and mtDNA
tcagttcagtgttttaatctgacgcaggcttatgcggaggagaatgttttcatgttacttatactaacattagttcttctatagggtgatagattggtccaattgggtgtgaggagttca

SEQ ID NO: 69581 - DNA, 120 bp, Homo sapiens
  misc_feature: 776 for SV(C|O) and mtDNA
tagccccaaacccactccaccttactaccagacaaccttagccaaaccatttacccaaataaagtataggcgatagaaattgaaacctggcgcaatagatatagtaccgcaagggaaaga

SEQ ID NO: 69582 - DNA, 120 bp, Homo sapiens
  misc_feature: 776 for SV(C|O) and mtDNA
tcgaaatcattcgttttgtttaaactatataccaattcggttcagtctaatcctttttgtagtcactcataggccagacttagggctaggatgatgattaataagagggatgacataact

SEQ ID NO: 69583 - DNA, 120 bp, Homo sapiens; identical to SEQ ID NO: 53012
  misc_feature: 776 for SV(C|O) and mtDNA

SEQ ID NO: 69584 - DNA, 120 bp, Homo sapiens
  misc_feature: 776 for SV(C|O) and mtDNA
tatgtacggtaaatggctttatgtactatgtgctgttaagggtgagtaggtttgttggtatcctagtgggtgaggggtggctttggagttgcagttgatgtgtgatagttgagggttgat

SEQ ID NO: 69585 - DNA, 120 bp, Homo sapiens
  misc_feature: 776 for SV(C|O) and mtDNA
gttttcatgttacttatactaacattagttcttctatagggtgatagattggtccaattgggtgtgaggagttcagttatatgtttgggattttttaggtagtgggtgttgagcttgaac

SEQ ID NO: 69586 - DNA, 120 bp, Homo sapiens
  misc_feature: 776 for SV(C|O) and mtDNA
gttactttgatagagtaaataataggagcttaaacccccttatttctaggactatgagaatcgaacccatccctgagaatccaaaattctccgtgccacctatcacaccccatcctaaag

SEQ ID NO: 69587 - DNA, 120 bp, Homo sapiens
  misc_feature: 776 for SV(C|O) and mtDNA
ggatgtttcatgtggtgtatgcatcggggtagtccgagtaacgtcggggcattccggataggccgagaaagtgttgtgggaagaaagttagatttacgccgatgaatatgatagtgaaat

SEQ ID NO: 69588 - DNA, 120 bp, Homo sapiens
  misc_feature: 776 for SV(C|O) and mtDNA
aaatatctcatcaacaaccgactaatcaccacccaacaatgactaatcaaactaacctcaaaacaaatgataaccatacacaacactaaaggacgaacctgatctcttatactagtatcc

SEQ ID NO: 69589 - DNA, 120 bp, Homo sapiens
  misc_feature: 776 for SV(C|O) and mtDNA
gctggtttcaagccaaccccatggcctccatgactttttcaaaaaggtattagaaaaaccatttcataactttgtcaaagttaaattataggctaaatcctatatatcttaatggcacat

SEQ ID NO: 69590 - DNA, 120 bp, Homo sapiens
  misc_feature: 776 for SV(C|O) and mtDNA
gcgagaataatgatgtatgctttgtttctgttgagtgtgggtttagtaatggggtttgtggggttttcttctaagccttctcctatttatgggggtttagtattgattgttagcggtgtg

SEQ ID NO: 69591 - DNA, 120 bp, Homo sapiens; identical to SEQ ID NO: 53289
  misc_feature: 776 for SV(C|O) and mtDNA

SEQ ID NO: 69592 - DNA, 120 bp, Homo sapiens; identical to SEQ ID NO: 56550
  misc_feature: 776 for SV(C|O) and mtDNA

SEQ ID NO: 69593 - DNA, 120 bp, Homo sapiens
  misc_feature: 776 for SV(C|O) and mtDNA
gaccacaccgctaacaatcaatactaaacccccataaataggagaaggcttagaagaaaaccccacaaaccccattactaaacccacactcaacagaaacaaagcatacatcattattct

SEQ ID NO: 69594 - DNA, 120 bp, Homo sapiens
  misc_feature: 776 for SV(C|O) and mtDNA
aacattaatcagttcttcaaatatctactcatcttcctaattaccatactaatcttagttaccgctaacaacctattccaactgttcatcggctgagagggcgtaggaattatatccttc

SEQ ID NO: 69595 - DNA, 120 bp, Homo sapiens
  misc_feature: 776 for SV(C|O) and mtDNA
atttatggtaccgtacaatattcatggtggctggcagtaatgtacgaattacatagcggttgttgatgggtgagtcaatacttgggtggcacccaaatctgcttccccatgaaagaacag

SEQ ID NO: 69596 - DNA, 120 bp, Homo sapiens
  misc_feature: 776 for SV(C|O) and mtDNA
atcaaataataagaaggtaatagctactaagaagaattttatggagaaagggacgcgggcgggggatatagggtcgaagccgcactcgtaaggggtggatttttctatgtagccgttgag

SEQ ID NO: 69597 - DNA, 120 bp, Homo sapiens
  misc_feature: 776 for SV(C|O) and mtDNA
aggtaataaataggattatcccgtatcgaaggcctttttggacaggtggtgtgtggtggccttggtatgtgctttctcgtgttacatcgcgccatcattggtatatggttagtgtgttgg

SEQ ID NO: 69598 - DNA, 120 bp, Homo sapiens
  misc_feature: 776 for SV(C|O) and mtDNA
atttttacgttgttagatatggggagtagtgtgattgaggtggagtagattaggcgtaggtagaagtagaggttaaggagggtgatggtggctatgatggtggggatgatgaggctattg

SEQ ID NO: 69599 - DNA, 120 bp, Homo sapiens; identical to SEQ ID NO: 54135
  misc_feature: 776 for SV(C|O) and mtDNA

SEQ ID NO: 69600 - DNA, 120 bp, Homo sapiens; identical to SEQ ID NO: 55279
  misc_feature: 776 for SV(C|O) and mtDNA

SEQ ID NO: 69601 - DNA, 120 bp, Homo sapiens; identical to SEQ ID NO: 56137
  misc_feature: 776 for SV(C|O) and mtDNA

SEQ ID NO: 69602 - DNA, 120 bp, Homo sapiens
  misc_feature: 775 for SV(C|O) and mtDNA
gcttcgaagcgaaaagtcctaatagtagaagaaccctccataaacctggagtgactatatggatgccccccaccctaccacacattcgaagaacccgtatacataaaatctagacaaaaa

SEQ ID NO: 69603 - DNA, 120 bp, Homo sapiens; identical to SEQ ID NO: 54338
  misc_feature: 775 for SV(C|O) and mtDNA

SEQ ID NO: 69604 - DNA, 120 bp, Homo sapiens; identical to SEQ ID NO: 52401
  misc_feature: 775 for SV(C|O) and mtDNA

SEQ ID NO: 69605 - DNA, 120 bp, Homo sapiens
  misc_feature: 775 for SV(C|O) and mtDNA
tttaatcttagagcgaaagcctataatcactgcgcccgctcataaggggatggccatggctaggtttatagatagttgggtggttggtgtaaatgagtgaggcaggagtccgaggaggtt

SEQ ID NO: 69606 - DNA, 120 bp, Homo sapiens
  misc_feature: 775 for SV(C|O) and mtDNA
tgtttaaactatataccaattcggttcagtctaatcctttttgtagtcactcataggccagacttagggctaggatgatgattaataagagggatgacataactattagtggtaggttag

SEQ ID NO: 69607 - DNA, 120 bp, Homo sapiens
  misc_feature: 775 for SV(C|O) and mtDNA
aagacattggaacactatacctattattcggcgcatgagctggagtcctaggcacagctctaagcctccttattcgagccgagctgggccagccaggcaaccttctaggtaacgaccaca

SEQ ID NO: 69608 - DNA, 120 bp, Homo sapiens
  misc_feature: 775 for SV(C|O) and mtDNA
tgtagtccgtgcgagaataatgatgtatgctttgtttctgttgagtgtgggtttagtaatggggtttgtggggttttcttctaagccttctcctatttatgggggtttagtattgattgt

SEQ ID NO: 69609 - DNA, 120 bp, Homo sapiens
  misc_feature: 775 for SV(C|O) and mtDNA
tggcatctgctcgggcgtatcatcaactgatgagcaagaaggatataattcctacgccctctcagccgatgaacagttggaataggttgttagcggtaactaagattagtatggtaatta

SEQ ID NO: 69610 - DNA, 120 bp, Homo sapiens; identical to SEQ ID NO: 57630
  misc_feature: 775 for SV(C|O) and mtDNA

SEQ ID NO: 69611 - DNA, 120 bp, Homo sapiens
  misc_feature: 775 for SV(C|O) and mtDNA
gtctcttccccacaacaatattcatgtgcctagaccaagaagttattatctcgaactgacactgagccacaacccaaacaacccagctctccctaagcttcaaactagactacttctcca

SEQ ID NO: 69612 - DNA, 120 bp, Homo sapiens; identical to SEQ ID NO: 52732
  misc_feature: 775 for SV(C|O) and mtDNA

SEQ ID NO: 69613 - DNA, 120 bp, Homo sapiens
  misc_feature: 775 for SV(C|O) and mtDNA
tgctaaaactaatcgtcccaacaattatattactaccactgacatgactttccaaaaaacacataatttgaatcaacacaaccacccacagcctaattattagcatcatccctctactat

SEQ ID NO: 69614 - DNA, 120 bp, Homo sapiens
  misc_feature: 775 for SV(C|O) and mtDNA
atatcacagtgagaattctatgatggaccatgtaacgaataatgctacagggatgaatattatggagaagtagtctagtttgaagcttagggagagctgggttgtttgggttgtggctca

SEQ ID NO: 69615 - DNA, 120 bp, Homo sapiens; identical to SEQ ID NO: 56074
  misc_feature: 775 for SV(C|O) and mtDNA

SEQ ID NO: 69616 - DNA, 120 bp, Homo sapiens
  misc_feature: 775 for SV(C|O) and mtDNA
tatatggatgccccccaccctaccacacattcgaagaacccgtatacataaaatctagacaaaaaaggaaggaatcgaaccccccaaagctggtttcaagccaaccccatggcctccatg

SEQ ID NO: 69617 - DNA, 120 bp, Homo sapiens; identical to SEQ ID NO: 57762
  misc_feature: 775 for SV(C|O) and mtDNA

SEQ ID NO: 69618 - DNA, 120 bp, Homo sapiens
  misc_feature: 775 for SV(C|O) and mtDNA
gttttaatctgacgcaggcttatgcggaggagaatgttttcatgttacttatactaacattagttcttctatagggtgatagattggtccaattgggtgtgaggagttcagttatatgtt

SEQ ID NO: 69619 - DNA, 120 bp, Homo sapiens
  misc_feature: 775 for SV(C|O) and mtDNA
ctgcctcactcatttacaccaaccacccaactatctataaacctagccatggccatccccttatgagcgggcgcagtgattataggctttcgctctaagattaaaaatgccctagcccac

SEQ ID NO: 69620 - DNA, 120 bp, Homo sapiens
  misc_feature: 775 for SV(C|O) and mtDNA
gtaggtttggtctagggtgtagcctgagaataggggaaatcagtgaatgaagcctcctatgatggcaaatacagctcctattgataggacatagtggaagtgagctacaacgtagtacgt

SEQ ID NO: 69621 - DNA, 120 bp, Homo sapiens
  misc_feature: 775 for SV(C|O) and mtDNA
attaaactttacttcctctctttcttcttcccactcatcctaaccctactcctaatcacataacctattcccccgagcaatctcaattacaatatatacaccaacaaacaatgttcaacc

SEQ ID NO: 69622 - DNA, 120 bp, Homo sapiens
  misc_feature: 775 for SV(C|O) and mtDNA
cacttatgactccctaaagcccatgtcgaagcccccatcgctgggtcaatagtacttgccgcagtactcttaaaactaggcggctatggtataatacgcctcacactcattctcaacccc

SEQ ID NO: 69623 - DNA, 120 bp, Homo sapiens
  misc_feature: 775 for SV(C|O) and mtDNA
ctgatctcttatactagtatccttaatcatttttattgccacaactaacctcctcggactcctgcctcactcatttacaccaaccacccaactatctataaacctagccatggccatccc

SEQ ID NO: 69624 - DNA, 120 bp, Homo sapiens
  misc_feature: 775 for SV(C|O) and mtDNA
gatttttctgagccttttaccactccagcctagcccctaccccccaattaggagggcactggcccccaacaggcatcaccccgctaaatcccctagaagtcccactcctaaacacatccg

SEQ ID NO: 69625 - DNA, 120 bp, Homo sapiens; identical to SEQ ID NO: 56088
  misc_feature: 775 for SV(C|O) and mtDNA

SEQ ID NO: 69626 - DNA, 120 bp, Homo sapiens
  misc_feature: 775 for SV(C|O) and mtDNA
ctaggatagtcagtagaattagaattgtgaagatgataagtgtagagggaaggttaatggttgatattgctagggtggcgcttccaattaggtgcatgagtaggtggcctgcagtaatgt

SEQ ID NO: 69627 - DNA, 120 bp, Homo sapiens
  misc_feature: 775 for SV(C|O) and mtDNA
cgtaggtttggtctagggtgtagcctgagaataggggaaatcagtgaatgaagcctcctatgatggcaaatacagctcctattgataggacatagtggaagtgagctacaacgtagtacg

SEQ ID NO: 69628 - DNA, 120 bp, Homo sapiens
  misc_feature: 775 for SV(C|O) and mtDNA
aataggattatcccgtatcgaaggcctttttggacaggtggtgtgtggtggccttggtatgtgctttctcgtgttacatcgcgccatcattggtatatggttagtgtgttggttagtagg

SEQ ID NO: 69629 - DNA, 120 bp, Homo sapiens; identical to SEQ ID NO: 52722
  misc_feature: 775 for SV(C|O) and mtDNA

SEQ ID NO: 69630 - DNA, 120 bp, Homo sapiens
  misc_feature: 775 for SV(C|O) and mtDNA
atggaggatggggattattgctaggatgaggatggatagtaatagggcaaggacgcctcctagtttgttagggacggatcggagaattgtgtaggcgaataggaaatatcattcgggctt

SEQ ID NO: 69631 - DNA, 120 bp, Homo sapiens
  misc_feature: 775 for SV(C|O) and mtDNA
agacccaaacattaatcagttcttcaaatatctactcatcttcctaattaccatactaatcttagttaccgctaacaacctattccaactgttcatcggctgagagggcgtaggaattat

SEQ ID NO: 69632 - DNA, 120 bp, Homo sapiens
  misc_feature: 775 for SV(C|O) and mtDNA
aaactaatcgtcccaacaattatattactaccactgacatgactttccaaaaaacacataatttgaatcaacacaaccacccacagcctaattattagcatcatccctctactatttttt

SEQ ID NO: 69633 - DNA, 120 bp, Homo sapiens
  misc_feature: 774 for SV(C|O) and mtDNA
ttttaatctgacgcaggcttatgcggaggagaatgttttcatgttacttatactaacattagttcttctatagggtgatagattggtccaattgggtgtgaggagttcagttatatgttt

SEQ ID NO: 69634 - DNA, 120 bp, Homo sapiens
  misc_feature: 774 for SV(C|O) and mtDNA
tcgctaaccccactaaaacactcaccaagacctcaacccctgacccccatgcctcaggatactcctcaatagccatcgctgtagtatatccaaagacaaccatcattccccctaaataaa

SEQ ID NO: 69635 - DNA, 120 bp, Homo sapiens
  misc_feature: 774 for SV(C|O) and mtDNA
ttccgttggtcaagttattggatcaattgagtatagtagttcgctttgactggtgaagtcttagcatgtactgctcggaggttgggttctgctccgaggtcgccccaaccgaaattttta

SEQ ID NO: 69636 - DNA, 120 bp, Homo sapiens
  misc_feature: 774 for SV(C|O) and mtDNA
tggagacatacagaaatagtcaaaccacgtctacaaaatgccagtatcaggcggcggcttcgaagccaaagtgatgtttggatgtaaagtgaaatattagttggcggatgaagcagatag

SEQ ID NO: 69637 - DNA, 120 bp, Homo sapiens
  misc_feature: 774 for SV(C|O) and mtDNA
tgaggcgtattataccatagccgcctagttttaagagtactgcggcaagtactattgacccagcgatgggggcttcgacatgggctttagggagtcataagtggagtccgtaaagaggta

SEQ ID NO: 69638 - DNA, 120 bp, Homo sapiens
  misc_feature: 774 for SV(C|O) and mtDNA
gtaacttgttccgttggtcaagttattggatcaattgagtatagtagttcgctttgactggtgaagtcttagcatgtactgctcggaggttgggttctgctccgaggtcgccccaaccga

SEQ ID NO: 69639 - DNA, 120 bp, Homo sapiens
  misc_feature: 774 for SV(C|O) and mtDNA
tcgcatccacctttattatcagtctcttccccacaacaatattcatgtgcctagaccaagaagttattatctcgaactgacactgagccacaacccaaacaacccagctctccctaagct

SEQ ID NO: 69640 - DNA, 120 bp, Homo sapiens
  misc_feature: 774 for SV(C|O) and mtDNA
tcagagtacttcgagtctcccttcaccatttccgacggcatctacggctcaacattttttgtagccacaggcttccacggacttcacgtcattattggctcaactttcctcactatctgc

SEQ ID NO: 69641 - DNA, 120 bp, Homo sapiens; identical to SEQ ID NO: 55091
  misc_feature: 774 for SV(C|O) and mtDNA

SEQ ID NO: 69642 - DNA, 120 bp, Homo sapiens
  misc_feature: 774 for SV(C|O) and mtDNA
tattatcgaaaccatcagcctactcattcaaccaatagccctggccgtacgcctaaccgctaacattactgcaggccacctactcatgcacctaattggaagcgccaccctagcaatatc

SEQ ID NO: 69643 - DNA, 120 bp, Homo sapiens; identical to SEQ ID NO: 52263
  misc_feature: 774 for SV(C|O) and mtDNA

SEQ ID NO: 69644 - DNA, 120 bp, Homo sapiens
  misc_feature: 774 for SV(C|O) and mtDNA
tagtttgtgtttaatatttttagttgggtgatgaggaatagtgtaaggagtatgggggtaattatggtgggccatacggtagtatttagttggggcatttcactgtaaagaggtgttggt

SEQ ID NO: 69645 - DNA, 120 bp, Homo sapiens
  misc_feature: 774 for SV(C|O) and mtDNA
tagagggatgatgctaataattaggctgtgggtggttgtgttgattcaaattatgtgttttttggaaagtcatgtcagtggtagtaatataattgttgggacgattagttttagcattgg

SEQ ID NO: 69646 - DNA, 120 bp, Homo sapiens
  misc_feature: 774 for SV(C|O) and mtDNA
tactttgatagagtaaataataggagcttaaacccccttatttctaggactatgagaatcgaacccatccctgagaatccaaaattctccgtgccacctatcacaccccatcctaaagta

SEQ ID NO: 69647 - DNA, 120 bp, Homo sapiens
  misc_feature: 774 for SV(C|O) and mtDNA
aactttacttcctctctttcttcttcccactcatcctaaccctactcctaatcacataacctattcccccgagcaatctcaattacaatatatacaccaacaaacaatgttcaaccagta

SEQ ID NO: 69648 - DNA, 120 bp, Homo sapiens
  misc_feature: 774 for SV(C|O) and mtDNA
taataaataggattatcccgtatcgaaggcctttttggacaggtggtgtgtggtggccttggtatgtgctttctcgtgttacatcgcgccatcattggtatatggttagtgtgttggtta

SEQ ID NO: 69649 - DNA, 120 bp, Homo sapiens
  misc_feature: 774 for SV(C|O) and mtDNA
aactaatcgtcccaacaattatattactaccactgacatgactttccaaaaaacacataatttgaatcaacacaaccacccacagcctaattattagcatcatccctctactatttttta

SEQ ID NO: 69650 - DNA, 120 bp, Homo sapiens
  misc_feature: 774 for SV(C|O) and mtDNA
actattaaacccatataacctcccccaaaattcagaataataacacacccgaccacaccgctaacaatcaatactaaacccccataaataggagaaggcttagaagaaaaccccacaaac

SEQ ID NO: 69651 - DNA, 120 bp, Homo sapiens
  misc_feature: 774 for SV(C|O) and mtDNA
gtttaaactatataccaattcggttcagtctaatcctttttgtagtcactcataggccagacttagggctaggatgatgattaataagagggatgacataactattagtggtaggttagt

SEQ ID NO: 69652 - DNA, 120 bp, Homo sapiens
  misc_feature: 774 for SV(C|O) and mtDNA
ccatgttgttagacatgggggcatgagttagcagttcttgtgagctttctcggtaaataaggggtcgtaagcctctgttgtcagattcacaatctgatgttttggttaaactatatttac

SEQ ID NO: 69653 - DNA, 120 bp, Homo sapiens
  misc_feature: 774 for SV(C|O) and mtDNA
ggtaacttgttccgttggtcaagttattggatcaattgagtatagtagttcgctttgactggtgaagtcttagcatgtactgctcggaggttgggttctgctccgaggtcgccccaaccg

SEQ ID NO: 69654 - DNA, 120 bp, Homo sapiens
  misc_feature: 774 for SV(C|O) and mtDNA
ccaaaccatttacccaaataaagtataggcgatagaaattgaaacctggcgcaatagatatagtaccgcaagggaaagatgaaaaattataaccaagcataatacagcaaggactaaccc

SEQ ID NO: 69655 - DNA, 120 bp, Homo sapiens
  misc_feature: 774 for SV(C|O) and mtDNA
ggcctaagaccaatggatagctgttatcctttaaaagttgagaaagccatgttgttagacatgggggcatgagttagcagttcttgtgagctttctcggtaaataaggggtcgtaagcct

SEQ ID NO: 69656 - DNA, 120 bp, Homo sapiens
  misc_feature: 774 for SV(C|O) and mtDNA
agagatcaggttcgtcctttagtgttgtgtatggttatcatttgttttgaggttagtttgattagtcattgttgggtggtgattagtcggttgttgatgagatatttggaggtggggatc

SEQ ID NO: 69657 - DNA, 120 bp, Homo sapiens
  misc_feature: 774 for SV(C|O) and mtDNA
gagtacttcgagtctcccttcaccatttccgacggcatctacggctcaacattttttgtagccacaggcttccacggacttcacgtcattattggctcaactttcctcactatctgcttc

SEQ ID NO: 69658 - DNA, 120 bp, Homo sapiens
  misc_feature: 774 for SV(C|O) and mtDNA
ctttgatagagtaaataataggagcttaaacccccttatttctaggactatgagaatcgaacccatccctgagaatccaaaattctccgtgccacctatcacaccccatcctaaagtaag

SEQ ID NO: 69659 - DNA, 120 bp, Homo sapiens
  misc_feature: 774 for SV(C|O) and mtDNA
ctcttttatcagacatatttcttaggtttgagggggaatgctggagattgtaatgggtatggagacatatcatataagtaatgctagggtgagtggtaggaagttttttcataggaggtg

SEQ ID NO: 69660 - DNA, 120 bp, Homo sapiens; identical to SEQ ID NO: 55273
  misc_feature: 774 for SV(C|O) and mtDNA

SEQ ID NO: 69661 - DNA, 120 bp, Homo sapiens
  misc_feature: 774 for SV(C|O) and mtDNA
aaataggattatcccgtatcgaaggcctttttggacaggtggtgtgtggtggccttggtatgtgctttctcgtgttacatcgcgccatcattggtatatggttagtgtgttggttagtag

SEQ ID NO: 69662 - DNA, 120 bp, Homo sapiens
  misc_feature: 774 for SV(C|O) and mtDNA
ctaaaactaatcgtcccaacaattatattactaccactgacatgactttccaaaaaacacataatttgaatcaacacaaccacccacagcctaattattagcatcatccctctactattt

SEQ ID NO: 69663 - DNA, 120 bp, Homo sapiens; identical to SEQ ID NO: 55918
  misc_feature: 774 for SV(C|O) and mtDNA

SEQ ID NO: 69664 - DNA, 120 bp, Homo sapiens
  misc_feature: 774 for SV(C|O) and mtDNA
cgcatccacctttattatcagtctcttccccacaacaatattcatgtgcctagaccaagaagttattatctcgaactgacactgagccacaacccaaacaacccagctctccctaagctt

SEQ ID NO: 69665 - DNA, 120 bp, Homo sapiens; identical to SEQ ID NO: 53494
  misc_feature: 774 for SV(C|O) and mtDNA

SEQ ID NO: 69666 - DNA, 120 bp, Homo sapiens
  misc_feature: 774 for SV(C|O) and mtDNA
aactcttttatcagacatatttcttaggtttgagggggaatgctggagattgtaatgggtatggagacatatcatataagtaatgctagggtgagtggtaggaagttttttcataggagg

SEQ ID NO: 69667 - DNA, 120 bp, Homo sapiens
  misc_feature: 774 for SV(C|O) and mtDNA
aatctatcaccctatagaagaactaatgttagtataagtaacatgaaaacattctcctccgcataagcctgcgtcagattaaaacactgaactgacaattaacagcccaatatctacaat

SEQ ID NO: 69668 - DNA, 120 bp, Homo sapiens; identical to SEQ ID NO: 55756
  misc_feature: 774 for SV(C|O) and mtDNA

SEQ ID NO: 69669 - DNA, 120 bp, Homo sapiens
  misc_feature: 774 for SV(C|O) and mtDNA
atatctcatcaacaaccgactaatcaccacccaacaatgactaatcaaactaacctcaaaacaaatgataaccatacacaacactaaaggacgaacctgatctcttatactagtatcctt

SEQ ID NO: 69670 - DNA, 120 bp, Homo sapiens
  misc_feature: 774 for SV(C|O) and mtDNA
aaatggattttggcgtaggtttggtctagggtgtagcctgagaataggggaaatcagtgaatgaagcctcctatgatggcaaatacagctcctattgataggacatagtggaagtgagct

SEQ ID NO: 69671 - DNA, 120 bp, Homo sapiens
  misc_feature: 774 for SV(C|O) and mtDNA
aaactatataccaattcggttcagtctaatcctttttgtagtcactcataggccagacttagggctaggatgatgattaataagagggatgacataactattagtggtaggttagttgtt

SEQ ID NO: 69672 - DNA, 120 bp, Homo sapiens
  misc_feature: 773 for SV(C|O) and mtDNA
tttttggggcctaagaccaatggatagctgttatcctttaaaagttgagaaagccatgttgttagacatgggggcatgagttagcagttcttgtgagctttctcggtaaataaggggtcg

SEQ ID NO: 69673 - DNA, 120 bp, Homo sapiens
  misc_feature: 773 for SV(C|O) and mtDNA
ttggtgttcttgtagttgaaatacaacgatggtttttcatatcattggtcgtggttgtagtccgtgcgagaataatgatgtatgctttgtttctgttgagtgtgggtttagtaatggggt

SEQ ID NO: 69674 - DNA, 120 bp, Homo sapiens
  misc_feature: 773 for SV(C|O) and mtDNA
aatttaacacccatagtaggcctaaaagcagccaccaattaagaaagcgttcaagctcaacacccactacctaaaaaatcccaaacatataactgaactcctcacacccaattggaccaa

SEQ ID NO: 69675 - DNA, 120 bp, Homo sapiens
  misc_feature: 773 for SV(C|O) and mtDNA
gaagtatgtgcctgcgttcaggcgttctggctggttgcctcatcgggtgatgatagccaaggtggggataagtgtggtttcgaagaagatataaaatatgattagttctgtggctgtgaa

SEQ ID NO: 69676 - DNA, 120 bp, Homo sapiens
  misc_feature: 773 for SV(C|O) and mtDNA
ttattatcgaaaccatcagcctactcattcaaccaatagccctggccgtacgcctaaccgctaacattactgcaggccacctactcatgcacctaattggaagcgccaccctagcaatat

SEQ ID NO: 69677 - DNA, 120 bp, Homo sapiens
  misc_feature: 773 for SV(C|O) and mtDNA
cgtaggtgcgataaataataggatgaggcaggaatcaaagacagatactgcgacatagggtgctccggctccagcgtctcgcaatgctatcgcgtgcacaccccccagacgaaaatacca

SEQ ID NO: 69678 - DNA, 120 bp, Homo sapiens
  misc_feature: 773 for SV(C|O) and mtDNA
cctgcctcactcatttacaccaaccacccaactatctataaacctagccatggccatccccttatgagcgggcgcagtgattataggctttcgctctaagattaaaaatgccctagccca

SEQ ID NO: 69679 - DNA, 120 bp, Homo sapiens; identical to SEQ ID NO: 57377
  misc_feature: 773 for SV(C|O) and mtDNA

SEQ ID NO: 69680 - DNA, 120 bp, Homo sapiens
  misc_feature: 773 for SV(C|O) and mtDNA
tcagagaaaaagtctttaactccaccattagcacccaaagctaagattctaatttaaactattctctgttctttcatggggaagcagatttgggtgccacccaagtattgactcacccat

SEQ ID NO: 69681 - DNA, 120 bp, Homo sapiens
  misc_feature: 773 for SV(C|O) and mtDNA
tatatcacagtgagaattctatgatggaccatgtaacgaataatgctacagggatgaatattatggagaagtagtctagtttgaagcttagggagagctgggttgtttgggttgtggctc

SEQ ID NO: 69682 - DNA, 120 bp, Homo sapiens
  misc_feature: 773 for SV(C|O) and mtDNA
cttttatcagacatatttcttaggtttgagggggaatgctggagattgtaatgggtatggagacatatcatataagtaatgctagggtgagtggtaggaagttttttcataggaggtgta

SEQ ID NO: 69683 - DNA, 120 bp, Homo sapiens
  misc_feature: 773 for SV(C|O) and mtDNA
ccgtggaagcctgtggctacaaaaaatgttgagccgtagatgccgtcggaaatggtgaagggagactcgaagtactctgaggcttgtaggagggtaaaatagagacccagtaaaattgta

SEQ ID NO: 69684 - DNA, 120 bp, Homo sapiens
  misc_feature: 773 for SV(C|O) and mtDNA
gttttgtttaaactatataccaattcggttcagtctaatcctttttgtagtcactcataggccagacttagggctaggatgatgattaataagagggatgacataactattagtggtagg

SEQ ID NO: 69685 - DNA, 120 bp, Homo sapiens
  misc_feature: 773 for SV(C|O) and mtDNA
agtaatattaataattttcatgatttgagaagccttcgcttcgaagcgaaaagtcctaatagtagaagaaccctccataaacctggagtgactatatggatgccccccaccctaccacac

SEQ ID NO: 69686 - DNA, 120 bp, Homo sapiens
  misc_feature: 773 for SV(C|O) and mtDNA
gtgtgaggcgtattataccatagccgcctagttttaagagtactgcggcaagtactattgacccagcgatgggggcttcgacatgggctttagggagtcataagtggagtccgtaaagag

SEQ ID NO: 69687 - DNA, 120 bp, Homo sapiens; identical to SEQ ID NO: 52074
  misc_feature: 773 for SV(C|O) and mtDNA

SEQ ID NO: 69688 - DNA, 120 bp, Homo sapiens
  misc_feature: 773 for SV(C|O) and mtDNA
ggttgtagtccgtgcgagaataatgatgtatgctttgtttctgttgagtgtgggtttagtaatggggtttgtggggttttcttctaagccttctcctatttatgggggtttagtattgat

SEQ ID NO: 69689 - DNA, 120 bp, Homo sapiens; identical to SEQ ID NO: 51959
  misc_feature: 773 for SV(C|O) and mtDNA

SEQ ID NO: 69690 - DNA, 120 bp, Homo sapiens
  misc_feature: 773 for SV(C|O) and mtDNA
ccacttatgactccctaaagcccatgtcgaagcccccatcgctgggtcaatagtacttgccgcagtactcttaaaactaggcggctatggtataatacgcctcacactcattctcaaccc

SEQ ID NO: 69691 - DNA, 120 bp, Homo sapiens
  misc_feature: 773 for SV(C|O) and mtDNA
ctcctgcctcactcatttacaccaaccacccaactatctataaacctagccatggccatccccttatgagcgggcgcagtgattataggctttcgctctaagattaaaaatgccctagcc

SEQ ID NO: 69692 - DNA, 120 bp, Homo sapiens; identical to SEQ ID NO: 52700
  misc_feature: 773 for SV(C|O) and mtDNA

SEQ ID NO: 69693 - DNA, 120 bp, Homo sapiens; identical to SEQ ID NO: 55244
  misc_feature: 773 for SV(C|O) and mtDNA

SEQ ID NO: 69694 - DNA, 120 bp, Homo sapiens
  misc_feature: 773 for SV(C|O) and mtDNA
actcctgcctcactcatttacaccaaccacccaactatctataaacctagccatggccatccccttatgagcgggcgcagtgattataggctttcgctctaagattaaaaatgccctagc

SEQ ID NO: 69695 - DNA, 120 bp, Homo sapiens; identical to SEQ ID NO: 53071
  misc_feature: 773 for SV(C|O) and mtDNA

SEQ ID NO: 69696 - DNA, 120 bp, Homo sapiens
  misc_feature: 773 for SV(C|O) and mtDNA
gcctaagaccaatggatagctgttatcctttaaaagttgagaaagccatgttgttagacatgggggcatgagttagcagttcttgtgagctttctcggtaaataaggggtcgtaagcctc

SEQ ID NO: 69697 - DNA, 120 bp, Homo sapiens
  misc_feature: 773 for SV(C|O) and mtDNA
cagagaaaaagtctttaactccaccattagcacccaaagctaagattctaatttaaactattctctgttctttcatggggaagcagatttgggtgccacccaagtattgactcacccatc

SEQ ID NO: 69698 - DNA, 120 bp, Homo sapiens
  misc_feature: 773 for SV(C|O) and mtDNA
gagatttgtagggagattagtatagagaggtagagtttttttcgtgatagtggttcactggataagtggcgttggcttgccatgattgtgaggggtaggagtcaggtagttagtattagg

SEQ ID NO: 69699 - DNA, 120 bp, Homo sapiens; identical to SEQ ID NO: 59220
  misc_feature: 773 for SV(C|O) and mtDNA

SEQ ID NO: 69700 - DNA, 120 bp, Homo sapiens; identical to SEQ ID NO: 58490
  misc_feature: 773 for SV(C|O) and mtDNA

SEQ ID NO: 69701 - DNA, 120 bp, Homo sapiens; identical to SEQ ID NO: 56590
  misc_feature: 773 for SV(C|O) and mtDNA

SEQ ID NO: 69702 - DNA, 120 bp, Homo sapiens
  misc_feature: 773 for SV(C|O) and mtDNA
attaactagttttgacaacattcaaaaaagagtaataaacttcgccttaattttaataatcaacaccctcctagccttactactaataattattacattttgactaccacaactcaacgg

SEQ ID NO: 69703 - DNA, 120 bp, Homo sapiens; identical to SEQ ID NO: 54100
  misc_feature: 773 for SV(C|O) and mtDNA

SEQ ID NO: 69704 - DNA, 120 bp, Homo sapiens
  misc_feature: 773 for SV(C|O) and mtDNA
attcatccctgtagcattattcgttacatggtccatcatagaattctcactgtgatatataaactcagacccaaacattaatcagttcttcaaatatctactcatcttcctaattaccat

SEQ ID NO: 69705 - DNA, 120 bp, Homo sapiens
  misc_feature: 772 for SV(C|O) and mtDNA
tttttcatatcattggtcgtggttgtagtccgtgcgagaataatgatgtatgctttgtttctgttgagtgtgggtttagtaatggggtttgtggggttttcttctaagccttctcctatt

SEQ ID NO: 69706 - DNA, 120 bp, Homo sapiens
  misc_feature: 772 for SV(C|O) and mtDNA
ttttgtttaaactatataccaattcggttcagtctaatcctttttgtagtcactcataggccagacttagggctaggatgatgattaataagagggatgacataactattagtggtaggt

SEQ ID NO: 69707 - DNA, 120 bp, Homo sapiens
  misc_feature: 772 for SV(C|O) and mtDNA
ttaacctaaatttctataagattattagtataaaaggggagataggtaggagtagcgtggtaagggcgatgagtgtggggaggaatggggtgggttttgtatgttcaaactgtcatttta

SEQ ID NO: 69708 - DNA, 120 bp, Homo sapiens; identical to SEQ ID NO: 53196
  misc_feature: 772 for SV(C|O) and mtDNA

SEQ ID NO: 69709 - DNA, 120 bp, Homo sapiens
  misc_feature: 772 for SV(C|O) and mtDNA
tgcgagaataatgatgtatgctttgtttctgttgagtgtgggtttagtaatggggtttgtggggttttcttctaagccttctcctatttatgggggtttagtattgattgttagcggtgt

SEQ ID NO: 69710 - DNA, 120 bp, Homo sapiens
  misc_feature: 772 for SV(C|O) and mtDNA
ccatcgggatgtcctgatccaacatcgaggtcgtaaaccctattgttgatatggactctagaataggattgcgctgttatccctagggtaacttgttccgttggtcaagttattggatca

SEQ ID NO: 69711 - DNA, 120 bp, Homo sapiens
  misc_feature: 772 for SV(C|O) and mtDNA
aaataataggatgaggcaggaatcaaagacagatactgcgacatagggtgctccggctccagcgtctcgcaatgctatcgcgtgcacaccccccagacgaaaataccaaatgcatggaga

SEQ ID NO: 69712 - DNA, 120 bp, Homo sapiens
  misc_feature: 772 for SV(C|O) and mtDNA
gtaactcttttatcagacatatttcttaggtttgagggggaatgctggagattgtaatgggtatggagacatatcatataagtaatgctagggtgagtggtaggaagttttttcatagga

SEQ ID NO: 69713 - DNA, 120 bp, Homo sapiens
  misc_feature: 772 for SV(C|O) and mtDNA
cgaaatcattcgttttgtttaaactatataccaattcggttcagtctaatcctttttgtagtcactcataggccagacttagggctaggatgatgattaataagagggatgacataacta

SEQ ID NO: 69714 - DNA, 120 bp, Homo sapiens
  misc_feature: 772 for SV(C|O) and mtDNA
taaataggattatcccgtatcgaaggcctttttggacaggtggtgtgtggtggccttggtatgtgctttctcgtgttacatcgcgccatcattggtatatggttagtgtgttggttagta

SEQ ID NO: 69715 - DNA, 120 bp, Homo sapiens
  misc_feature: 772 for SV(C|O) and mtDNA
acccgaccacaccgctaacaatcaatactaaacccccataaataggagaaggcttagaagaaaaccccacaaaccccattactaaacccacactcaacagaaacaaagcatacatcatta

SEQ ID NO: 69716 - DNA, 120 bp, Homo sapiens
  misc_feature: 772 for SV(C|O) and mtDNA
taactcttttatcagacatatttcttaggtttgagggggaatgctggagattgtaatgggtatggagacatatcatataagtaatgctagggtgagtggtaggaagttttttcataggag

SEQ ID NO: 69717 - DNA, 120 bp, Homo sapiens
  misc_feature: 772 for SV(C|O) and mtDNA
taaataataggatgaggcaggaatcaaagacagatactgcgacatagggtgctccggctccagcgtctcgcaatgctatcgcgtgcacaccccccagacgaaaataccaaatgcatggag

SEQ ID NO: 69718 - DNA, 120 bp, Homo sapiens
  misc_feature: 772 for SV(C|O) and mtDNA
cgtacaatattcatggtggctggcagtaatgtacgaattacatagcggttgttgatgggtgagtcaatacttgggtggcacccaaatctgcttccccatgaaagaacagagaatagttta

SEQ ID NO: 69719 - DNA, 120 bp, Homo sapiens
  misc_feature: 772 for SV(C|O) and mtDNA
gttgtagtccgtgcgagaataatgatgtatgctttgtttctgttgagtgtgggtttagtaatggggtttgtggggttttcttctaagccttctcctatttatgggggtttagtattgatt

SEQ ID NO: 69720 - DNA, 120 bp, Homo sapiens
  misc_feature: 772 for SV(C|O) and mtDNA
gggcctaagaccaatggatagctgttatcctttaaaagttgagaaagccatgttgttagacatgggggcatgagttagcagttcttgtgagctttctcggtaaataaggggtcgtaagcc

SEQ ID NO: 69721 - DNA, 120 bp, Homo sapiens; identical to SEQ ID NO: 58353
  misc_feature: 772 for SV(C|O) and mtDNA

SEQ ID NO: 69722 - DNA, 120 bp, Homo sapiens
  misc_feature: 772 for SV(C|O) and mtDNA
gcatccacctttattatcagtctcttccccacaacaatattcatgtgcctagaccaagaagttattatctcgaactgacactgagccacaacccaaacaacccagctctccctaagcttc

SEQ ID NO: 69723 - DNA, 120 bp, Homo sapiens
  misc_feature: 772 for SV(C|O) and mtDNA
aggcgtattataccatagccgcctagttttaagagtactgcggcaagtactattgacccagcgatgggggcttcgacatgggctttagggagtcataagtggagtccgtaaagaggtatc

SEQ ID NO: 69724 - DNA, 120 bp, Homo sapiens
  misc_feature: 772 for SV(C|O) and mtDNA
ctcattcatcgacctccccaccccatccaacatctccgcatgatgaaacttcggctcactccttggcgcctgcctgatcctccaaatcaccacaggactattcctagccatgcactactc

SEQ ID NO: 69725 - DNA, 120 bp, Homo sapiens
  misc_feature: 772 for SV(C|O) and mtDNA
gaggcgtattataccatagccgcctagttttaagagtactgcggcaagtactattgacccagcgatgggggcttcgacatgggctttagggagtcataagtggagtccgtaaagaggtat

SEQ ID NO: 69726 - DNA, 120 bp, Homo sapiens
  misc_feature: 772 for SV(C|O) and mtDNA
ccctaggctcactaaacattctactactcactctcactgcccaagaactatcaaactcctgagccaacaacttaatatgactagcttacacaatagcttttatagtaaagatacctcttt

SEQ ID NO: 69727 - DNA, 120 bp, Homo sapiens
  misc_feature: 772 for SV(C|O) and mtDNA
attcgttttgtttaaactatataccaattcggttcagtctaatcctttttgtagtcactcataggccagacttagggctaggatgatgattaataagagggatgacataactattagtgg

SEQ ID NO: 69728 - DNA, 120 bp, Homo sapiens; identical to SEQ ID NO: 53075
  misc_feature: 772 for SV(C|O) and mtDNA

SEQ ID NO: 69729 - DNA, 120 bp, Homo sapiens; identical to SEQ ID NO: 56271
  misc_feature: 772 for SV(C|O) and mtDNA

SEQ ID NO: 69730 - DNA, 120 bp, Homo sapiens
  misc_feature: 772 for SV(C|O) and mtDNA
actgcggcaagtactattgacccagcgatgggggcttcgacatgggctttagggagtcataagtggagtccgtaaagaggtatctttactataaaagctattgtgtaagctagtcatatt

SEQ ID NO: 69731 - DNA, 120 bp, Homo sapiens; identical to SEQ ID NO: 53476
  misc_feature: 771 for SV(C|O) and mtDNA

SEQ ID NO: 69732 - DNA, 120 bp, Homo sapiens
  misc_feature: 771 for SV(C|O) and mtDNA
ggggtggctttggagttgcagttgatgtgtgatagttgagggttgattgctgtacttgcttgtaagcatggggagggggttttgatgtggattgggtttttatgtactacaggtggtcaa

SEQ ID NO: 69733 - DNA, 120 bp, Homo sapiens
  misc_feature: 771 for SV(C|O) and mtDNA
cgtggaagcctgtggctacaaaaaatgttgagccgtagatgccgtcggaaatggtgaagggagactcgaagtactctgaggcttgtaggagggtaaaatagagacccagtaaaattgtaa

SEQ ID NO: 69734 - DNA, 120 bp, Homo sapiens
  misc_feature: 771 for SV(C|O) and mtDNA
actaatcgtcccaacaattatattactaccactgacatgactttccaaaaaacacataatttgaatcaacacaaccacccacagcctaattattagcatcatccctctactattttttaa

SEQ ID NO: 69735 - DNA, 120 bp, Homo sapiens
  misc_feature: 771 for SV(C|O) and mtDNA
tgatccccacctccaaatatctcatcaacaaccgactaatcaccacccaacaatgactaatcaaactaacctcaaaacaaatgataaccatacacaacactaaaggacgaacctgatctc

SEQ ID NO: 69736 - DNA, 120 bp, Homo sapiens
  misc_feature: 771 for SV(C|O) and mtDNA
tccaattaactagttttgacaacattcaaaaaagagtaataaacttcgccttaattttaataatcaacaccctcctagccttactactaataattattacattttgactaccacaactca

SEQ ID NO: 69737 - DNA, 120 bp, Homo sapiens
  misc_feature: 771 for SV(C|O) and mtDNA
agtacttcgagtctcccttcaccatttccgacggcatctacggctcaacattttttgtagccacaggcttccacggacttcacgtcattattggctcaactttcctcactatctgcttca

SEQ ID NO: 69738 - DNA, 120 bp, Homo sapiens
  misc_feature: 771 for SV(C|O) and mtDNA
tgaacagtgatagtattattccttctaggcatagtagggaggatatgaggtgtgagcggtatactagtattcctagaagtgagatggtaaatgctagtataatatttatgtaaatgaggg

SEQ ID NO: 69739 - DNA, 120 bp, Homo sapiens
  misc_feature: 771 for SV(C|O) and mtDNA
tcttttatcagacatatttcttaggtttgagggggaatgctggagattgtaatgggtatggagacatatcatataagtaatgctagggtgagtggtaggaagttttttcataggaggtgt

SEQ ID NO: 69740 - DNA, 120 bp, Homo sapiens
  misc_feature: 771 for SV(C|O) and mtDNA
tctgaggtaataaataggattatcccgtatcgaaggcctttttggacaggtggtgtgtggtggccttggtatgtgctttctcgtgttacatcgcgccatcattggtatatggttagtgtg

SEQ ID NO: 69741 - DNA, 120 bp, Homo sapiens; identical to SEQ ID NO: 59738
  misc_feature: 771 for SV(C|O) and mtDNA

SEQ ID NO: 69742 - DNA, 120 bp, Homo sapiens; identical to SEQ ID NO: 54470
  misc_feature: 771 for SV(C|O) and mtDNA

SEQ ID NO: 69743 - DNA, 120 bp, Homo sapiens; identical to SEQ ID NO: 58210
  misc_feature: 771 for SV(C|O) and mtDNA

SEQ ID NO: 69744 - DNA, 120 bp, Homo sapiens; identical to SEQ ID NO: 53686
  misc_feature: 771 for SV(C|O) and mtDNA

SEQ ID NO: 69745 - DNA, 120 bp, Homo sapiens; identical to SEQ ID NO: 58171
  misc_feature: 771 for SV(C|O) and mtDNA

SEQ ID NO: 69746 - DNA, 120 bp, Homo sapiens
  misc_feature: 771 for SV(C|O) and mtDNA
gggcgtatcatcaactgatgagcaagaaggatataattcctacgccctctcagccgatgaacagttggaataggttgttagcggtaactaagattagtatggtaattaggaagatgagta

SEQ ID NO: 69747 - DNA, 120 bp, Homo sapiens; identical to SEQ ID NO: 52521
  misc_feature: 771 for SV(C|O) and mtDNA

SEQ ID NO: 69748 - DNA, 120 bp, Homo sapiens
  misc_feature: 771 for SV(C|O) and mtDNA
aattaaactttacttcctctctttcttcttcccactcatcctaaccctactcctaatcacataacctattcccccgagcaatctcaattacaatatatacaccaacaaacaatgttcaac

SEQ ID NO: 69749 - DNA, 120 bp, Homo sapiens
  misc_feature: 771 for SV(C|O) and mtDNA
aaagacattggaacactatacctattattcggcgcatgagctggagtcctaggcacagctctaagcctccttattcgagccgagctgggccagccaggcaaccttctaggtaacgaccac

SEQ ID NO: 69750 - DNA, 120 bp, Homo sapiens; identical to SEQ ID NO: 53671
  misc_feature: 771 for SV(C|O) and mtDNA

SEQ ID NO: 69751 - DNA, 120 bp, Homo sapiens
  misc_feature: 771 for SV(C|O) and mtDNA
gtaataaataggattatcccgtatcgaaggcctttttggacaggtggtgtgtggtggccttggtatgtgctttctcgtgttacatcgcgccatcattggtatatggttagtgtgttggtt

SEQ ID NO: 69752 - DNA, 120 bp, Homo sapiens
  misc_feature: 771 for SV(C|O) and mtDNA
ggtaataaataggattatcccgtatcgaaggcctttttggacaggtggtgtgtggtggccttggtatgtgctttctcgtgttacatcgcgccatcattggtatatggttagtgtgttggt

SEQ ID NO: 69753 - DNA, 120 bp, Homo sapiens
  misc_feature: 771 for SV(C|O) and mtDNA
ggcgttgattagtagtagttactggttgaacattgtttgttggtgtatatattgtaattgagattgctcgggggaataggttatgtgattaggagtagggttaggatgagtgggaagaag

SEQ ID NO: 69754 - DNA, 120 bp, Homo sapiens; identical to SEQ ID NO: 58809
  misc_feature: 771 for SV(C|O) and mtDNA

SEQ ID NO: 69755 - DNA, 120 bp, Homo sapiens; identical to SEQ ID NO: 52640
  misc_feature: 771 for SV(C|O) and mtDNA

SEQ ID NO: 69756 - DNA, 120 bp, Homo sapiens; identical to SEQ ID NO: 52980
  misc_feature: 771 for SV(C|O) and mtDNA

SEQ ID NO: 69757 - DNA, 120 bp, Homo sapiens; identical to SEQ ID NO: 57880
  misc_feature: 771 for SV(C|O) and mtDNA

SEQ ID NO: 69758 - DNA, 120 bp, Homo sapiens
  misc_feature: 771 for SV(C|O) and mtDNA
ctgaggtaataaataggattatcccgtatcgaaggcctttttggacaggtggtgtgtggtggccttggtatgtgctttctcgtgttacatcgcgccatcattggtatatggttagtgtgt

SEQ ID NO: 69759 - DNA, 120 bp, Homo sapiens
  misc_feature: 771 for SV(C|O) and mtDNA
cgttttgtttaaactatataccaattcggttcagtctaatcctttttgtagtcactcataggccagacttagggctaggatgatgattaataagagggatgacataactattagtggtag

SEQ ID NO: 69760 - DNA, 120 bp, Homo sapiens
  misc_feature: 771 for SV(C|O) and mtDNA
aaatttttggggcctaagaccaatggatagctgttatcctttaaaagttgagaaagccatgttgttagacatgggggcatgagttagcagttcttgtgagctttctcggtaaataagggg

SEQ ID NO: 69761 - DNA, 120 bp, Homo sapiens
  misc_feature: 771 for SV(C|O) and mtDNA
aaaatgttgagccgtagatgccgtcggaaatggtgaagggagactcgaagtactctgaggcttgtaggagggtaaaatagagacccagtaaaattgtaataagcagtgcttgaattattt

SEQ ID NO: 69762 - DNA, 120 bp, Homo sapiens
  misc_feature: 771 for SV(C|O) and mtDNA
aaaactaatcgtcccaacaattatattactaccactgacatgactttccaaaaaacacataatttgaatcaacacaaccacccacagcctaattattagcatcatccctctactattttt

SEQ ID NO: 69763 - DNA, 120 bp, Homo sapiens
  misc_feature: 770 for SV(C|O) and mtDNA
ttttcatgttacttatactaacattagttcttctatagggtgatagattggtccaattgggtgtgaggagttcagttatatgtttgggattttttaggtagtgggtgttgagcttgaacg

SEQ ID NO: 69764 - DNA, 120 bp, Homo sapiens
  misc_feature: 770 for SV(C|O) and mtDNA
tttctgagccttttaccactccagcctagcccctaccccccaattaggagggcactggcccccaacaggcatcaccccgctaaatcccctagaagtcccactcctaaacacatccgtatt

SEQ ID NO: 69765 - DNA, 120 bp, Homo sapiens; identical to SEQ ID NO: 54077
  misc_feature: 770 for SV(C|O) and mtDNA

SEQ ID NO: 69766 - DNA, 120 bp, Homo sapiens; identical to SEQ ID NO: 57682
  misc_feature: 770 for SV(C|O) and mtDNA

SEQ ID NO: 69767 - DNA, 120 bp, Homo sapiens
  misc_feature: 770 for SV(C|O) and mtDNA
ttcttattatttgatctagaaattgccctccttttacccctaccatgagccctacaaacaactaacctaccactaatagttatgtcatccctcttattaatcatcatcctagccctaagt

SEQ ID NO: 69768 - DNA, 120 bp, Homo sapiens; identical to SEQ ID NO: 54566
  misc_feature: 770 for SV(C|O) and mtDNA

SEQ ID NO: 69769 - DNA, 120 bp, Homo sapiens
  misc_feature: 770 for SV(C|O) and mtDNA
ccctagtaggctcccttcccctactcatcgcactaatttacactcacaacaccctaggctcactaaacattctactactcactctcactgcccaagaactatcaaactcctgagccaaca

SEQ ID NO: 69770 - DNA, 120 bp, Homo sapiens
  misc_feature: 770 for SV(C|O) and mtDNA
tgttgagccgtagatgccgtcggaaatggtgaagggagactcgaagtactctgaggcttgtaggagggtaaaatagagacccagtaaaattgtaataagcagtgcttgaattatttggtt

SEQ ID NO: 69771 - DNA, 120 bp, Homo sapiens
  misc_feature: 770 for SV(C|O) and mtDNA
tgtgaggcgtattataccatagccgcctagttttaagagtactgcggcaagtactattgacccagcgatgggggcttcgacatgggctttagggagtcataagtggagtccgtaaagagg

SEQ ID NO: 69772 - DNA, 120 bp, Homo sapiens
  misc_feature: 770 for SV(C|O) and mtDNA
tgtagcattattcgttacatggtccatcatagaattctcactgtgatatataaactcagacccaaacattaatcagttcttcaaatatctactcatcttcctaattaccatactaatctt

SEQ ID NO: 69773 - DNA, 120 bp, Homo sapiens; identical to SEQ ID NO: 57441
  misc_feature: 770 for SV(C|O) and mtDNA

SEQ ID NO: 69774 - DNA, 120 bp, Homo sapiens
  misc_feature: 770 for SV(C|O) and mtDNA
catccacctttattatcagtctcttccccacaacaatattcatgtgcctagaccaagaagttattatctcgaactgacactgagccacaacccaaacaacccagctctccctaagcttca

SEQ ID NO: 69775 - DNA, 120 bp, Homo sapiens; identical to SEQ ID NO: 55935
  misc_feature: 770 for SV(C|O) and mtDNA

SEQ ID NO: 69776 - DNA, 120 bp, Homo sapiens
  misc_feature: 770 for SV(C|O) and mtDNA
tatgggctttggtgagggaggtaggtggtagtttgtgtttaatatttttagttgggtgatgaggaatagtgtaaggagtatgggggtaattatggtgggccatacggtagtatttagttg

SEQ ID NO: 69777 - DNA, 120 bp, Homo sapiens
  misc_feature: 770 for SV(C|O) and mtDNA
ctcttccccacaacaatattcatgtgcctagaccaagaagttattatctcgaactgacactgagccacaacccaaacaacccagctctccctaagcttcaaactagactacttctccata

SEQ ID NO: 69778 - DNA, 120 bp, Homo sapiens
  misc_feature: 770 for SV(C|O) and mtDNA
ggattatcccgtatcgaaggcctttttggacaggtggtgtgtggtggccttggtatgtgctttctcgtgttacatcgcgccatcattggtatatggttagtgtgttggttagtaggccta

SEQ ID NO: 69779 - DNA, 120 bp, Homo sapiens
  misc_feature: 770 for SV(C|O) and mtDNA
gggatgatgctaataattaggctgtgggtggttgtgttgattcaaattatgtgttttttggaaagtcatgtcagtggtagtaatataattgttgggacgattagttttagcattggagta

SEQ ID NO: 69780 - DNA, 120 bp, Homo sapiens
  misc_feature: 770 for SV(C|O) and mtDNA
taatcttagagcgaaagcctataatcactgcgcccgctcataaggggatggccatggctaggtttatagatagttgggtggttggtgtaaatgagtgaggcaggagtccgaggaggttag

SEQ ID NO: 69781 - DNA, 120 bp, Homo sapiens; identical to SEQ ID NO: 58921
  misc_feature: 770 for SV(C|O) and mtDNA

SEQ ID NO: 69782 - DNA, 120 bp, Homo sapiens
  misc_feature: 770 for SV(C|O) and mtDNA
gttgtcgtgcaggtagaggcttactagaagtgtgaaaacgtaggcttggattaaggcgacagcgatttctaggatagtcagtagaattagaattgtgaagatgataagtgtagagggaag

SEQ ID NO: 69783 - DNA, 120 bp, Homo sapiens; identical to SEQ ID NO: 53984
  misc_feature: 770 for SV(C|O) and mtDNA

SEQ ID NO: 69784 - DNA, 120 bp, Homo sapiens; identical to SEQ ID NO: 58502
  misc_feature: 770 for SV(C|O) and mtDNA

SEQ ID NO: 69785 - DNA, 120 bp, Homo sapiens
  misc_feature: 770 for SV(C|O) and mtDNA
gccaaaccatttacccaaataaagtataggcgatagaaattgaaacctggcgcaatagatatagtaccgcaagggaaagatgaaaaattataaccaagcataatacagcaaggactaacc

SEQ ID NO: 69786 - DNA, 120 bp, Homo sapiens; identical to SEQ ID NO: 51891
  misc_feature: 770 for SV(C|O) and mtDNA

SEQ ID NO: 69787 - DNA, 120 bp, Homo sapiens; identical to SEQ ID NO: 56382
  misc_feature: 770 for SV(C|O) and mtDNA

SEQ ID NO: 69788 - DNA, 120 bp, Homo sapiens
  misc_feature: 770 for SV(C|O) and mtDNA
gagaaggcttagaagaaaaccccacaaaccccattactaaacccacactcaacagaaacaaagcatacatcattattctcgcacggactacaaccacgaccaatgatatgaaaaaccatc

SEQ ID NO: 69789 - DNA, 120 bp, Homo sapiens; identical to SEQ ID NO: 60077
  misc_feature: 770 for SV(C|O) and mtDNA

SEQ ID NO: 69790 - DNA, 120 bp, Homo sapiens
  misc_feature: 770 for SV(C|O) and mtDNA
aaatcccaaacatataactgaactcctcacacccaattggaccaatctatcaccctatagaagaactaatgttagtataagtaacatgaaaacattctcctccgcataagcctgcgtcag

SEQ ID NO: 69791 - DNA, 120 bp, Homo sapiens
  misc_feature: 770 for SV(C|O) and mtDNA
cccgaccacaccgctaacaatcaatactaaacccccataaataggagaaggcttagaagaaaaccccacaaaccccattactaaacccacactcaacagaaacaaagcatacatcattat

SEQ ID NO: 69792 - DNA, 120 bp, Homo sapiens
  misc_feature: 770 for SV(C|O) and mtDNA
atatcattggtcgtggttgtagtccgtgcgagaataatgatgtatgctttgtttctgttgagtgtgggtttagtaatggggtttgtggggttttcttctaagccttctcctatttatggg

SEQ ID NO: 69793 - DNA, 120 bp, Homo sapiens
  misc_feature: 770 for SV(C|O) and mtDNA
atgatggttgtctttggatatactacagcgatggctattgaggagtatcctgaggcatgggggtcaggggttgaggtcttggtgagtgttttagtggggttagcgatggaggtaggattg

SEQ ID NO: 69794 - DNA, 120 bp, Homo sapiens
  misc_feature: 770 for SV(C|O) and mtDNA
attaatcagttcttcaaatatctactcatcttcctaattaccatactaatcttagttaccgctaacaacctattccaactgttcatcggctgagagggcgtaggaattatatccttcttg

SEQ ID NO: 69795 - DNA, 120 bp, Homo sapiens
  misc_feature: 770 for SV(C|O) and mtDNA
atcacagtgagaattctatgatggaccatgtaacgaataatgctacagggatgaatattatggagaagtagtctagtttgaagcttagggagagctgggttgtttgggttgtggctcagt

SEQ ID NO: 69796 - DNA, 120 bp, Homo sapiens
  misc_feature: 770 for SV(C|O) and mtDNA
actcttttatcagacatatttcttaggtttgagggggaatgctggagattgtaatgggtatggagacatatcatataagtaatgctagggtgagtggtaggaagttttttcataggaggt

SEQ ID NO: 69797 - DNA, 120 bp, Homo sapiens; identical to SEQ ID NO: 58332
  misc_feature: 769 for SV(C|O) and mtDNA

SEQ ID NO: 69798 - DNA, 120 bp, Homo sapiens; identical to SEQ ID NO: 58097
  misc_feature: 769 for SV(C|O) and mtDNA

SEQ ID NO: 69799 - DNA, 120 bp, Homo sapiens
  misc_feature: 769 for SV(C|O) and mtDNA
tttaaactatataccaattcggttcagtctaatcctttttgtagtcactcataggccagacttagggctaggatgatgattaataagagggatgacataactattagtggtaggttagtt

SEQ ID NO: 69800 - DNA, 120 bp, Homo sapiens; identical to SEQ ID NO: 57860
  misc_feature: 769 for SV(C|O) and mtDNA

SEQ ID NO: 69801 - DNA, 120 bp, Homo sapiens
  misc_feature: 769 for SV(C|O) and mtDNA
ccaaacatataactgaactcctcacacccaattggaccaatctatcaccctatagaagaactaatgttagtataagtaacatgaaaacattctcctccgcataagcctgcgtcagattaa

SEQ ID NO: 69802 - DNA, 120 bp, Homo sapiens; identical to SEQ ID NO: 57660
  misc_feature: 769 for SV(C|O) and mtDNA

SEQ ID NO: 69803 - DNA, 120 bp, Homo sapiens
  misc_feature: 769 for SV(C|O) and mtDNA
aggagaaggcttagaagaaaaccccacaaaccccattactaaacccacactcaacagaaacaaagcatacatcattattctcgcacggactacaaccacgaccaatgatatgaaaaacca

SEQ ID NO: 69804 - DNA, 120 bp, Homo sapiens
  misc_feature: 769 for SV(C|O) and mtDNA
tggggattattgctaggatgaggatggatagtaatagggcaaggacgcctcctagtttgttagggacggatcggagaattgtgtaggcgaataggaaatatcattcgggcttgatgtggg

SEQ ID NO: 69805 - DNA, 120 bp, Homo sapiens
  misc_feature: 769 for SV(C|O) and mtDNA
aaaacgaatgatttcgactcattaaattatgataatcatatttaccaaatgcccctcatttacataaatattatactagcatttaccatctcacttctaggaatactagtataccgctca

SEQ ID NO: 69806 - DNA, 120 bp, Homo sapiens
  misc_feature: 769 for SV(C|O) and mtDNA
tctcttccccacaacaatattcatgtgcctagaccaagaagttattatctcgaactgacactgagccacaacccaaacaacccagctctccctaagcttcaaactagactacttctccat

SEQ ID NO: 69807 - DNA, 120 bp, Homo sapiens
  misc_feature: 769 for SV(C|O) and mtDNA
tctaggatagtcagtagaattagaattgtgaagatgataagtgtagagggaaggttaatggttgatattgctagggtggcgcttccaattaggtgcatgagtaggtggcctgcagtaatg

SEQ ID NO: 69808 - DNA, 120 bp, Homo sapiens
  misc_feature: 769 for SV(C|O) and mtDNA
tcattcgttttgtttaaactatataccaattcggttcagtctaatcctttttgtagtcactcataggccagacttagggctaggatgatgattaataagagggatgacataactattagt

SEQ ID NO: 69809 - DNA, 120 bp, Homo sapiens
  misc_feature: 769 for SV(C|O) and mtDNA
atatggatgccccccaccctaccacacattcgaagaacccgtatacataaaatctagacaaaaaaggaaggaatcgaaccccccaaagctggtttcaagccaaccccatggcctccatga

SEQ ID NO: 69810 - DNA, 120 bp, Homo sapiens
  misc_feature: 769 for SV(C|O) and mtDNA
ctatgtacggtaaatggctttatgtactatgtgctgttaagggtgagtaggtttgttggtatcctagtgggtgaggggtggctttggagttgcagttgatgtgtgatagttgagggttga

SEQ ID NO: 69811 - DNA, 120 bp, Homo sapiens
  misc_feature: 769 for SV(C|O) and mtDNA
tatttcctcacgcaagcaaccgcatccataatccttctaatagctatcctcttcaacaatatactctccggacaatgaaccataaccaatactaccaatcaatactcatcattaataatc

SEQ ID NO: 69812 - DNA, 120 bp, Homo sapiens
  misc_feature: 769 for SV(C|O) and mtDNA
ggatttagcggggtgatgcctgttgggggccagtgccctcctaattggggggtaggggctaggctggagtggtaaaaggctcagaaaaatcctgcgaagaaaaaaacttctgaggtaata

SEQ ID NO: 69813 - DNA, 120 bp, Homo sapiens
  misc_feature: 769 for SV(C|O) and mtDNA
gtactgcggcaagtactattgacccagcgatgggggcttcgacatgggctttagggagtcataagtggagtccgtaaagaggtatctttactataaaagctattgtgtaagctagtcata

SEQ ID NO: 69814 - DNA, 120 bp, Homo sapiens; identical to SEQ ID NO: 56344
  misc_feature: 769 for SV(C|O) and mtDNA

SEQ ID NO: 69815 - DNA, 120 bp, Homo sapiens
  misc_feature: 769 for SV(C|O) and mtDNA
taataggtatagtgttccaatgtctttgtggtttgtagagaatagtcaacggtcggcgaacatcagtgggggtgaggtaaaatggctgagtgaagcattggactgtaaatctaaagacag

SEQ ID NO: 69816 - DNA, 120 bp, Homo sapiens; identical to SEQ ID NO: 53201
  misc_feature: 769 for SV(C|O) and mtDNA

SEQ ID NO: 69817 - DNA, 120 bp, Homo sapiens; identical to SEQ ID NO: 52059
  misc_feature: 769 for SV(C|O) and mtDNA

SEQ ID NO: 69818 - DNA, 120 bp, Homo sapiens
  misc_feature: 769 for SV(C|O) and mtDNA
gttcggtaagcattaggaatgccattgcgattagaatgggtacaatgaggagtaggaggttggccatgggtatgttgttaagaagaggaattgaacctctgactgtaaagttttaagttt

SEQ ID NO: 69819 - DNA, 120 bp, Homo sapiens
  misc_feature: 769 for SV(C|O) and mtDNA
agccaaaccatttacccaaataaagtataggcgatagaaattgaaacctggcgcaatagatatagtaccgcaagggaaagatgaaaaattataaccaagcataatacagcaaggactaac

SEQ ID NO: 69820 - DNA, 120 bp, Homo sapiens
  misc_feature: 769 for SV(C|O) and mtDNA
gggtaacttgttccgttggtcaagttattggatcaattgagtatagtagttcgctttgactggtgaagtcttagcatgtactgctcggaggttgggttctgctccgaggtcgccccaacc

SEQ ID NO: 69821 - DNA, 120 bp, Homo sapiens; identical to SEQ ID NO: 55547
  misc_feature: 769 for SV(C|O) and mtDNA

SEQ ID NO: 69822 - DNA, 120 bp, Homo sapiens; identical to SEQ ID NO: 57017
  misc_feature: 769 for SV(C|O) and mtDNA

SEQ ID NO: 69823 - DNA, 120 bp, Homo sapiens; identical to SEQ ID NO: 53840
  misc_feature: 769 for SV(C|O) and mtDNA

SEQ ID NO: 69824 - DNA, 120 bp, Homo sapiens
  misc_feature: 769 for SV(C|O) and mtDNA
cagtctcttccccacaacaatattcatgtgcctagaccaagaagttattatctcgaactgacactgagccacaacccaaacaacccagctctccctaagcttcaaactagactacttctc

SEQ ID NO: 69825 - DNA, 120 bp, Homo sapiens; identical to SEQ ID NO: 59826
  misc_feature: 769 for SV(C|O) and mtDNA

SEQ ID NO: 69826 - DNA, 120 bp, Homo sapiens
  misc_feature: 769 for SV(C|O) and mtDNA
cgtgcgagaataatgatgtatgctttgtttctgttgagtgtgggtttagtaatggggtttgtggggttttcttctaagccttctcctatttatgggggtttagtattgattgttagcggt

SEQ ID NO: 69827 - DNA, 120 bp, Homo sapiens
  misc_feature: 769 for SV(C|O) and mtDNA
aaacaaaacgaatgatttcgactcattaaattatgataatcatatttaccaaatgcccctcatttacataaatattatactagcatttaccatctcacttctaggaatactagtataccg

SEQ ID NO: 69828 - DNA, 120 bp, Homo sapiens
  misc_feature: 769 for SV(C|O) and mtDNA
atttccccctctattgatccccacctccaaatatctcatcaacaaccgactaatcaccacccaacaatgactaatcaaactaacctcaaaacaaatgataaccatacacaacactaaagg

SEQ ID NO: 69829 - DNA, 120 bp, Homo sapiens
  misc_feature: 769 for SV(C|O) and mtDNA
caccctaggctcactaaacattctactactcactctcactgcccaagaactatcaaactcctgagccaacaacttaatatgactagcttacacaatagcttttatagtaaagatacctct

SEQ ID NO: 69830 - DNA, 120 bp, Homo sapiens
  misc_feature: 769 for SV(C|O) and mtDNA
atgttgagccgtagatgccgtcggaaatggtgaagggagactcgaagtactctgaggcttgtaggagggtaaaatagagacccagtaaaattgtaataagcagtgcttgaattatttggt

SEQ ID NO: 69831 - DNA, 120 bp, Homo sapiens; identical to SEQ ID NO: 53452
  misc_feature: 769 for SV(C|O) and mtDNA

SEQ ID NO: 69832 - DNA, 120 bp, Homo sapiens
  misc_feature: 768 for SV(C|O) and mtDNA
ttttctgagccttttaccactccagcctagcccctaccccccaattaggagggcactggcccccaacaggcatcaccccgctaaatcccctagaagtcccactcctaaacacatccgtat

SEQ ID NO: 69833 - DNA, 120 bp, Homo sapiens
  misc_feature: 768 for SV(C|O) and mtDNA
ttctcgtcttgctgtgtcatgcccgcctcttcacgggcaggtcaatttcactggttaaaagtaagagacagctgaaccctcgtggagccattcatacaggtccctatttaaggaacaagt

SEQ ID NO: 69834 - DNA, 120 bp, Homo sapiens; identical to SEQ ID NO: 59086
  misc_feature: 768 for SV(C|O) and mtDNA

SEQ ID NO: 69835 - DNA, 120 bp, Homo sapiens
  misc_feature: 768 for SV(C|O) and mtDNA
ttccaattaactagttttgacaacattcaaaaaagagtaataaacttcgccttaattttaataatcaacaccctcctagccttactactaataattattacattttgactaccacaactc

SEQ ID NO: 69836 - DNA, 120 bp, Homo sapiens; identical to SEQ ID NO: 52798
  misc_feature: 768 for SV(C|O) and mtDNA

SEQ ID NO: 69837 - DNA, 120 bp, Homo sapiens
  misc_feature: 768 for SV(C|O) and mtDNA
gcgttgattagtagtagttactggttgaacattgtttgttggtgtatatattgtaattgagattgctcgggggaataggttatgtgattaggagtagggttaggatgagtgggaagaaga

SEQ ID NO: 69838 - DNA, 120 bp, Homo sapiens; identical to SEQ ID NO: 52057
  misc_feature: 768 for SV(C|O) and mtDNA

SEQ ID NO: 69839 - DNA, 120 bp, Homo sapiens
  misc_feature: 768 for SV(C|O) and mtDNA
tatcattggtcgtggttgtagtccgtgcgagaataatgatgtatgctttgtttctgttgagtgtgggtttagtaatggggtttgtggggttttcttctaagccttctcctatttatgggg

SEQ ID NO: 69840 - DNA, 120 bp, Homo sapiens
  misc_feature: 768 for SV(C|O) and mtDNA
tatcagtctcttccccacaacaatattcatgtgcctagaccaagaagttattatctcgaactgacactgagccacaacccaaacaacccagctctccctaagcttcaaactagactactt

SEQ ID NO: 69841 - DNA, 120 bp, Homo sapiens; identical to SEQ ID NO: 59401
  misc_feature: 768 for SV(C|O) and mtDNA

SEQ ID NO: 69842 - DNA, 120 bp, Homo sapiens; identical to SEQ ID NO: 55290
  misc_feature: 768 for SV(C|O) and mtDNA

SEQ ID NO: 69843 - DNA, 120 bp, Homo sapiens; identical to SEQ ID NO: 53634
  misc_feature: 768 for SV(C|O) and mtDNA

SEQ ID NO: 69844 - DNA, 120 bp, Homo sapiens; identical to SEQ ID NO: 53785
  misc_feature: 768 for SV(C|O) and mtDNA

SEQ ID NO: 69845 - DNA, 120 bp, Homo sapiens; identical to SEQ ID NO: 52855
  misc_feature: 768 for SV(C|O) and mtDNA

SEQ ID NO: 69846 - DNA, 120 bp, Homo sapiens
  misc_feature: 768 for SV(C|O) and mtDNA
aatcattcgttttgtttaaactatataccaattcggttcagtctaatcctttttgtagtcactcataggccagacttagggctaggatgatgattaataagagggatgacataactatta

SEQ ID NO: 69847 - DNA, 120 bp, Homo sapiens
  misc_feature: 768 for SV(C|O) and mtDNA
gtgcgagaataatgatgtatgctttgtttctgttgagtgtgggtttagtaatggggtttgtggggttttcttctaagccttctcctatttatgggggtttagtattgattgttagcggtg

SEQ ID NO: 69848 - DNA, 120 bp, Homo sapiens
  misc_feature: 768 for SV(C|O) and mtDNA
ggggaagcagatttgggtgccacccaagtattgactcacccatcaacaaccgctatgtaattcgtacattactgccagccaccatgaatattgtacggtaccataaatacttgaccacct

SEQ ID NO: 69849 - DNA, 120 bp, Homo sapiens; identical to SEQ ID NO: 54934
  misc_feature: 768 for SV(C|O) and mtDNA

SEQ ID NO: 69850 - DNA, 120 bp, Homo sapiens
  misc_feature: 768 for SV(C|O) and mtDNA
aataaataggattatcccgtatcgaaggcctttttggacaggtggtgtgtggtggccttggtatgtgctttctcgtgttacatcgcgccatcattggtatatggttagtgtgttggttag

SEQ ID NO: 69851 - DNA, 120 bp, Homo sapiens
  misc_feature: 768 for SV(C|O) and mtDNA
aaacattaatcagttcttcaaatatctactcatcttcctaattaccatactaatcttagttaccgctaacaacctattccaactgttcatcggctgagagggcgtaggaattatatcctt

SEQ ID NO: 69852 - DNA, 120 bp, Homo sapiens
  misc_feature: 767 for SV(C|O) and mtDNA
ttcgttttgtttaaactatataccaattcggttcagtctaatcctttttgtagtcactcataggccagacttagggctaggatgatgattaataagagggatgacataactattagtggt

SEQ ID NO: 69853 - DNA, 120 bp, Homo sapiens; identical to SEQ ID NO: 52340
  misc_feature: 767 for SV(C|O) and mtDNA

SEQ ID NO: 69854 - DNA, 120 bp, Homo sapiens
  misc_feature: 767 for SV(C|O) and mtDNA
tggaggatggggattattgctaggatgaggatggatagtaatagggcaaggacgcctcctagtttgttagggacggatcggagaattgtgtaggcgaataggaaatatcattcgggcttg

SEQ ID NO: 69855 - DNA, 120 bp, Homo sapiens; identical to SEQ ID NO: 52799
  misc_feature: 767 for SV(C|O) and mtDNA

SEQ ID NO: 69856 - DNA, 120 bp, Homo sapiens; identical to SEQ ID NO: 54658
  misc_feature: 767 for SV(C|O) and mtDNA

SEQ ID NO: 69857 - DNA, 120 bp, Homo sapiens
  misc_feature: 767 for SV(C|O) and mtDNA
tgaacatacaaaacccaccccattcctccccacactcatcgcccttaccacgctactcctacctatctccccttttatactaataatcttatagaaatttaggttaaatacagaccaaga

SEQ ID NO: 69858 - DNA, 120 bp, Homo sapiens; identical to SEQ ID NO: 52681
  misc_feature: 767 for SV(C|O) and mtDNA

SEQ ID NO: 69859 - DNA, 120 bp, Homo sapiens; identical to SEQ ID NO: 53107
  misc_feature: 767 for SV(C|O) and mtDNA

SEQ ID NO: 69860 - DNA, 120 bp, Homo sapiens
  misc_feature: 767 for SV(C|O) and mtDNA
gttattatcgaaaccatcagcctactcattcaaccaatagccctggccgtacgcctaaccgctaacattactgcaggccacctactcatgcacctaattggaagcgccaccctagcaata

SEQ ID NO: 69861 - DNA, 120 bp, Homo sapiens; identical to SEQ ID NO: 53199
  misc_feature: 767 for SV(C|O) and mtDNA

SEQ ID NO: 69862 - DNA, 120 bp, Homo sapiens
  misc_feature: 767 for SV(C|O) and mtDNA
tatgtcctatcaataggagctgtatttgccatcataggaggcttcattcactgatttcccctattctcaggctacaccctagaccaaacctacgccaaaatccatttcactatcatattc

SEQ ID NO: 69863 - DNA, 120 bp, Homo sapiens; identical to SEQ ID NO: 55348
  misc_feature: 767 for SV(C|O) and mtDNA

SEQ ID NO: 69864 - DNA, 120 bp, Homo sapiens
  misc_feature: 767 for SV(C|O) and mtDNA
gacccaaacattaatcagttcttcaaatatctactcatcttcctaattaccatactaatcttagttaccgctaacaacctattccaactgttcatcggctgagagggcgtaggaattata

SEQ ID NO: 69865 - DNA, 120 bp, Homo sapiens; identical to SEQ ID NO: 57635
  misc_feature: 767 for SV(C|O) and mtDNA

SEQ ID NO: 69866 - DNA, 120 bp, Homo sapiens; identical to SEQ ID NO: 54688
  misc_feature: 767 for SV(C|O) and mtDNA

SEQ ID NO: 69867 - DNA, 120 bp, Homo sapiens
  misc_feature: 767 for SV(C|O) and mtDNA
taatcagttcttcaaatatctactcatcttcctaattaccatactaatcttagttaccgctaacaacctattccaactgttcatcggctgagagggcgtaggaattatatccttcttgct

SEQ ID NO: 69868 - DNA, 120 bp, Homo sapiens
  misc_feature: 767 for SV(C|O) and mtDNA
taaactatataccaattcggttcagtctaatcctttttgtagtcactcataggccagacttagggctaggatgatgattaataagagggatgacataactattagtggtaggttagttgt

SEQ ID NO: 69869 - DNA, 120 bp, Homo sapiens
  misc_feature: 767 for SV(C|O) and mtDNA
attcatcgacctccccaccccatccaacatctccgcatgatgaaacttcggctcactccttggcgcctgcctgatcctccaaatcaccacaggactattcctagccatgcactactcacc

SEQ ID NO: 69870 - DNA, 120 bp, Homo sapiens
  misc_feature: 767 for SV(C|O) and mtDNA
ggggattattgctaggatgaggatggatagtaatagggcaaggacgcctcctagtttgttagggacggatcggagaattgtgtaggcgaataggaaatatcattcgggcttgatgtgggg

SEQ ID NO: 69871 - DNA, 120 bp, Homo sapiens; identical to SEQ ID NO: 55811
  misc_feature: 767 for SV(C|O) and mtDNA

SEQ ID NO: 69872 - DNA, 120 bp, Homo sapiens
  misc_feature: 767 for SV(C|O) and mtDNA
gaaatggattttggcgtaggtttggtctagggtgtagcctgagaataggggaaatcagtgaatgaagcctcctatgatggcaaatacagctcctattgataggacatagtggaagtgagc

SEQ ID NO: 69873 - DNA, 120 bp, Homo sapiens; identical to SEQ ID NO: 58221
  misc_feature: 767 for SV(C|O) and mtDNA

SEQ ID NO: 69874 - DNA, 120 bp, Homo sapiens
  misc_feature: 767 for SV(C|O) and mtDNA
cgagaataatgatgtatgctttgtttctgttgagtgtgggtttagtaatggggtttgtggggttttcttctaagccttctcctatttatgggggtttagtattgattgttagcggtgtgg

SEQ ID NO: 69875 - DNA, 120 bp, Homo sapiens; identical to SEQ ID NO: 54717
  misc_feature: 767 for SV(C|O) and mtDNA

SEQ ID NO: 69876 - DNA, 120 bp, Homo sapiens
  misc_feature: 767 for SV(C|O) and mtDNA
aaatgttgagccgtagatgccgtcggaaatggtgaagggagactcgaagtactctgaggcttgtaggagggtaaaatagagacccagtaaaattgtaataagcagtgcttgaattatttg

SEQ ID NO: 69877 - DNA, 120 bp, Homo sapiens; identical to SEQ ID NO: 52349
  misc_feature: 767 for SV(C|O) and mtDNA

SEQ ID NO: 69878 - DNA, 120 bp, Homo sapiens; identical to SEQ ID NO: 53645
  misc_feature: 767 for SV(C|O) and mtDNA

SEQ ID NO: 69879 - DNA, 120 bp, Homo sapiens; identical to SEQ ID NO: 54246
  misc_feature: 766 for SV(C|O) and mtDNA

SEQ ID NO: 69880 - DNA, 120 bp, Homo sapiens
  misc_feature: 766 for SV(C|O) and mtDNA
tccacctttattatcagtctcttccccacaacaatattcatgtgcctagaccaagaagttattatctcgaactgacactgagccacaacccaaacaacccagctctccctaagcttcaaa

SEQ ID NO: 69881 - DNA, 120 bp, Homo sapiens
  misc_feature: 766 for SV(C|O) and mtDNA
tttatcagacatatttcttaggtttgagggggaatgctggagattgtaatgggtatggagacatatcatataagtaatgctagggtgagtggtaggaagttttttcataggaggtgtatg

SEQ ID NO: 69882 - DNA, 120 bp, Homo sapiens; identical to SEQ ID NO: 59570
  misc_feature: 766 for SV(C|O) and mtDNA

SEQ ID NO: 69883 - DNA, 120 bp, Homo sapiens; identical to SEQ ID NO: 59389
  misc_feature: 766 for SV(C|O) and mtDNA

SEQ ID NO: 69884 - DNA, 120 bp, Homo sapiens
  misc_feature: 766 for SV(C|O) and mtDNA
atgttgttagacatgggggcatgagttagcagttcttgtgagctttctcggtaaataaggggtcgtaagcctctgttgtcagattcacaatctgatgttttggttaaactatatttacaa

SEQ ID NO: 69885 - DNA, 120 bp, Homo sapiens
  misc_feature: 766 for SV(C|O) and mtDNA
ttcgaagcgaaaagtcctaatagtagaagaaccctccataaacctggagtgactatatggatgccccccaccctaccacacattcgaagaacccgtatacataaaatctagacaaaaaag

SEQ ID NO: 69886 - DNA, 120 bp, Homo sapiens; identical to SEQ ID NO: 57829
  misc_feature: 766 for SV(C|O) and mtDNA

SEQ ID NO: 69887 - DNA, 120 bp, Homo sapiens; identical to SEQ ID NO: 54941
  misc_feature: 766 for SV(C|O) and mtDNA

SEQ ID NO: 69888 - DNA, 120 bp, Homo sapiens
  misc_feature: 766 for SV(C|O) and mtDNA
ttatcagacatatttcttaggtttgagggggaatgctggagattgtaatgggtatggagacatatcatataagtaatgctagggtgagtggtaggaagttttttcataggaggtgtatga

SEQ ID NO: 69889 - DNA, 120 bp, Homo sapiens; identical to SEQ ID NO: 52353
  misc_feature: 766 for SV(C|O) and mtDNA

SEQ ID NO: 69890 - DNA, 120 bp, Homo sapiens; identical to SEQ ID NO: 56460
  misc_feature: 766 for SV(C|O) and mtDNA

SEQ ID NO: 69891 - DNA, 120 bp, Homo sapiens
  misc_feature: 766 for SV(C|O) and mtDNA
catgttgttagacatgggggcatgagttagcagttcttgtgagctttctcggtaaataaggggtcgtaagcctctgttgtcagattcacaatctgatgttttggttaaactatatttaca

SEQ ID NO: 69892 - DNA, 120 bp, Homo sapiens
  misc_feature: 766 for SV(C|O) and mtDNA
atcagagaaaaagtctttaactccaccattagcacccaaagctaagattctaatttaaactattctctgttctttcatggggaagcagatttgggtgccacccaagtattgactcaccca

SEQ ID NO: 69893 - DNA, 120 bp, Homo sapiens
  misc_feature: 766 for SV(C|O) and mtDNA
tggagttaaagactttttctctgatttgtccttggaaaaaggttttcatctccggtttacaagactggtgtattagtttatactacaaggacaggcccatttgagtattttgttttcaat

SEQ ID NO: 69894 - DNA, 120 bp, Homo sapiens
  misc_feature: 766 for SV(C|O) and mtDNA
tcattcatcgacctccccaccccatccaacatctccgcatgatgaaacttcggctcactccttggcgcctgcctgatcctccaaatcaccacaggactattcctagccatgcactactca

SEQ ID NO: 69895 - DNA, 120 bp, Homo sapiens; identical to SEQ ID NO: 52217
  misc_feature: 766 for SV(C|O) and mtDNA

SEQ ID NO: 69896 - DNA, 120 bp, Homo sapiens
  misc_feature: 766 for SV(C|O) and mtDNA
tagtccgtgcgagaataatgatgtatgctttgtttctgttgagtgtgggtttagtaatggggtttgtggggttttcttctaagccttctcctatttatgggggtttagtattgattgtta

SEQ ID NO: 69897 - DNA, 120 bp, Homo sapiens
  misc_feature: 766 for SV(C|O) and mtDNA
atgctaaaactaatcgtcccaacaattatattactaccactgacatgactttccaaaaaacacataatttgaatcaacacaaccacccacagcctaattattagcatcatccctctacta

SEQ ID NO: 69898 - DNA, 120 bp, Homo sapiens
  misc_feature: 766 for SV(C|O) and mtDNA
gtactacacgacacgtactacgttgtagctcacttccactatgtcctatcaataggagctgtatttgccatcataggaggcttcattcactgatttcccctattctcaggctacacccta

SEQ ID NO: 69899 - DNA, 120 bp, Homo sapiens
  misc_feature: 766 for SV(C|O) and mtDNA
agggtaacttgttccgttggtcaagttattggatcaattgagtatagtagttcgctttgactggtgaagtcttagcatgtactgctcggaggttgggttctgctccgaggtcgccccaac

SEQ ID NO: 69900 - DNA, 120 bp, Homo sapiens
  misc_feature: 766 for SV(C|O) and mtDNA
gtcgcatccacctttattatcagtctcttccccacaacaatattcatgtgcctagaccaagaagttattatctcgaactgacactgagccacaacccaaacaacccagctctccctaagc

SEQ ID NO: 69901 - DNA, 120 bp, Homo sapiens; identical to SEQ ID NO: 54013
  misc_feature: 766 for SV(C|O) and mtDNA

SEQ ID NO: 69902 - DNA, 120 bp, Homo sapiens; identical to SEQ ID NO: 52639
  misc_feature: 766 for SV(C|O) and mtDNA

SEQ ID NO: 69903 - DNA, 120 bp, Homo sapiens; identical to SEQ ID NO: 53187
  misc_feature: 766 for SV(C|O) and mtDNA

SEQ ID NO: 69904 - DNA, 120 bp, Homo sapiens
  misc_feature: 766 for SV(C|O) and mtDNA
acctgatctcttatactagtatccttaatcatttttattgccacaactaacctcctcggactcctgcctcactcatttacaccaaccacccaactatctataaacctagccatggccatc

SEQ ID NO: 69905 - DNA, 120 bp, Homo sapiens
  misc_feature: 766 for SV(C|O) and mtDNA
aatcagttcttcaaatatctactcatcttcctaattaccatactaatcttagttaccgctaacaacctattccaactgttcatcggctgagagggcgtaggaattatatccttcttgctc

SEQ ID NO: 69906 - DNA, 120 bp, Homo sapiens
  misc_feature: 766 for SV(C|O) and mtDNA
cttcgaatttgcaattcaatatgaaaatcacctcggagctggtaaaaagaggcctaacccctgtctttagatttacagtccaatgcttcactcagccattttacctcacccccactgatg

SEQ ID NO: 69907 - DNA, 120 bp, Homo sapiens
  misc_feature: 766 for SV(C|O) and mtDNA
ctgttaagggtgagtaggtttgttggtatcctagtgggtgaggggtggctttggagttgcagttgatgtgtgatagttgagggttgattgctgtacttgcttgtaagcatggggaggggg

SEQ ID NO: 69908 - DNA, 120 bp, Homo sapiens
  misc_feature: 766 for SV(C|O) and mtDNA
ccggaatgccccgacgttactcggactaccccgatgcatacaccacatgaaacatcctatcatctgtaggctcattcatttctctaacagcagtaatattaataattttcatgatttgag

SEQ ID NO: 69909 - DNA, 120 bp, Homo sapiens
  misc_feature: 766 for SV(C|O) and mtDNA
cgctaaccccactaaaacactcaccaagacctcaacccctgacccccatgcctcaggatactcctcaatagccatcgctgtagtatatccaaagacaaccatcattccccctaaataaat

SEQ ID NO: 69910 - DNA, 120 bp, Homo sapiens; identical to SEQ ID NO: 53472
  misc_feature: 766 for SV(C|O) and mtDNA

SEQ ID NO: 69911 - DNA, 120 bp, Homo sapiens
  misc_feature: 766 for SV(C|O) and mtDNA
agcagtgcttgaattatttggtttcggttgttttctattagactatggtgagctcaggtgattgatactcctgatgcgagtaatacggatgtgtttaggagtgggacttctaggggattt

SEQ ID NO: 69912 - DNA, 120 bp, Homo sapiens
  misc_feature: 765 for SV(C|O) and mtDNA
cttcgaagcgaaaagtcctaatagtagaagaaccctccataaacctggagtgactatatggatgccccccaccctaccacacattcgaagaacccgtatacataaaatctagacaaaaaa

SEQ ID NO: 69913 - DNA, 120 bp, Homo sapiens; identical to SEQ ID NO: 59541
  misc_feature: 765 for SV(C|O) and mtDNA

SEQ ID NO: 69914 - DNA, 120 bp, Homo sapiens; identical to SEQ ID NO: 52419
  misc_feature: 765 for SV(C|O) and mtDNA

SEQ ID NO: 69915 - DNA, 120 bp, Homo sapiens
  misc_feature: 765 for SV(C|O) and mtDNA
ggaatgccccgacgttactcggactaccccgatgcatacaccacatgaaacatcctatcatctgtaggctcattcatttctctaacagcagtaatattaataattttcatgatttgagaa

SEQ ID NO: 69916 - DNA, 120 bp, Homo sapiens
  misc_feature: 765 for SV(C|O) and mtDNA
ttcatcgacctccccaccccatccaacatctccgcatgatgaaacttcggctcactccttggcgcctgcctgatcctccaaatcaccacaggactattcctagccatgcactactcacca

SEQ ID NO: 69917 - DNA, 120 bp, Homo sapiens; identical to SEQ ID NO: 58100
  misc_feature: 765 for SV(C|O) and mtDNA

SEQ ID NO: 69918 - DNA, 120 bp, Homo sapiens
  misc_feature: 765 for SV(C|O) and mtDNA
accccctccccatgcttacaagcaagtacagcaatcaaccctcaactatcacacatcaactgcaactccaaagccacccctcacccactaggataccaacaaacctactcacccttaaca

SEQ ID NO: 69919 - DNA, 120 bp, Homo sapiens
  misc_feature: 765 for SV(C|O) and mtDNA
tggatgccccccaccctaccacacattcgaagaacccgtatacataaaatctagacaaaaaaggaaggaatcgaaccccccaaagctggtttcaagccaaccccatggcctccatgactt

SEQ ID NO: 69920 - DNA, 120 bp, Homo sapiens
  misc_feature: 765 for SV(C|O) and mtDNA
atcagttcttcaaatatctactcatcttcctaattaccatactaatcttagttaccgctaacaacctattccaactgttcatcggctgagagggcgtaggaattatatccttcttgctca

SEQ ID NO: 69921 - DNA, 120 bp, Homo sapiens
  misc_feature: 765 for SV(C|O) and mtDNA
tcgttttgtttaaactatataccaattcggttcagtctaatcctttttgtagtcactcataggccagacttagggctaggatgatgattaataagagggatgacataactattagtggta

SEQ ID NO: 69922 - DNA, 120 bp, Homo sapiens
  misc_feature: 765 for SV(C|O) and mtDNA
agatttgtagggagattagtatagagaggtagagtttttttcgtgatagtggttcactggataagtggcgttggcttgccatgattgtgaggggtaggagtcaggtagttagtattagga

SEQ ID NO: 69923 - DNA, 120 bp, Homo sapiens; identical to SEQ ID NO: 57299
  misc_feature: 765 for SV(C|O) and mtDNA

SEQ ID NO: 69924 - DNA, 120 bp, Homo sapiens; identical to SEQ ID NO: 53234
  misc_feature: 765 for SV(C|O) and mtDNA

SEQ ID NO: 69925 - DNA, 120 bp, Homo sapiens
  misc_feature: 765 for SV(C|O) and mtDNA
taaacaaaacgaatgatttcgactcattaaattatgataatcatatttaccaaatgcccctcatttacataaatattatactagcatttaccatctcacttctaggaatactagtatacc

SEQ ID NO: 69926 - DNA, 120 bp, Homo sapiens
  misc_feature: 765 for SV(C|O) and mtDNA
acttccaattaactagttttgacaacattcaaaaaagagtaataaacttcgccttaattttaataatcaacaccctcctagccttactactaataattattacattttgactaccacaac

SEQ ID NO: 69927 - DNA, 120 bp, Homo sapiens
  misc_feature: 765 for SV(C|O) and mtDNA
gttgagccgtagatgccgtcggaaatggtgaagggagactcgaagtactctgaggcttgtaggagggtaaaatagagacccagtaaaattgtaataagcagtgcttgaattatttggttt

SEQ ID NO: 69928 - DNA, 120 bp, Homo sapiens
  misc_feature: 765 for SV(C|O) and mtDNA
gtgaggcgtattataccatagccgcctagttttaagagtactgcggcaagtactattgacccagcgatgggggcttcgacatgggctttagggagtcataagtggagtccgtaaagaggt

SEQ ID NO: 69929 - DNA, 120 bp, Homo sapiens; identical to SEQ ID NO: 52184
  misc_feature: 765 for SV(C|O) and mtDNA

SEQ ID NO: 69930 - DNA, 120 bp, Homo sapiens
  misc_feature: 765 for SV(C|O) and mtDNA
caatgctaaaactaatcgtcccaacaattatattactaccactgacatgactttccaaaaaacacataatttgaatcaacacaaccacccacagcctaattattagcatcatccctctac

SEQ ID NO: 69931 - DNA, 120 bp, Homo sapiens
  misc_feature: 765 for SV(C|O) and mtDNA
aaatcagagaaaaagtctttaactccaccattagcacccaaagctaagattctaatttaaactattctctgttctttcatggggaagcagatttgggtgccacccaagtattgactcacc

SEQ ID NO: 69932 - DNA, 120 bp, Homo sapiens
  misc_feature: 765 for SV(C|O) and mtDNA
cctgatctcttatactagtatccttaatcatttttattgccacaactaacctcctcggactcctgcctcactcatttacaccaaccacccaactatctataaacctagccatggccatcc

SEQ ID NO: 69933 - DNA, 120 bp, Homo sapiens
  misc_feature: 765 for SV(C|O) and mtDNA
aattttaataatcaacaccctcctagccttactactaataattattacattttgactaccacaactcaacggctacatagaaaaatccaccccttacgagtgcggcttcgaccctatatc

SEQ ID NO: 69934 - DNA, 120 bp, Homo sapiens; identical to SEQ ID NO: 59441
  misc_feature: 765 for SV(C|O) and mtDNA

SEQ ID NO: 69935 - DNA, 120 bp, Homo sapiens
  misc_feature: 765 for SV(C|O) and mtDNA
ctttaatttattaatgcaaacagtacctaacaaacccacaggtcctaaactaccaaacctgcattaaaaatttcggttggggcgacctcggagcagaacccaacctccgagcagtacatg

SEQ ID NO: 69936 - DNA, 120 bp, Homo sapiens
  misc_feature: 765 for SV(C|O) and mtDNA
cttcgagtctcccttcaccatttccgacggcatctacggctcaacattttttgtagccacaggcttccacggacttcacgtcattattggctcaactttcctcactatctgcttcatccg

SEQ ID NO: 69937 - DNA, 120 bp, Homo sapiens
  misc_feature: 765 for SV(C|O) and mtDNA
ctgtcattttatttttacgttgttagatatggggagtagtgtgattgaggtggagtagattaggcgtaggtagaagtagaggttaaggagggtgatggtggctatgatggtggggatgat

SEQ ID NO: 69938 - DNA, 120 bp, Homo sapiens
  misc_feature: 765 for SV(C|O) and mtDNA
agtccgtgcgagaataatgatgtatgctttgtttctgttgagtgtgggtttagtaatggggtttgtggggttttcttctaagccttctcctatttatgggggtttagtattgattgttag

SEQ ID NO: 69939 - DNA, 120 bp, Homo sapiens
  misc_feature: 765 for SV(C|O) and mtDNA
atgaacagtgatagtattattccttctaggcatagtagggaggatatgaggtgtgagcggtatactagtattcctagaagtgagatggtaaatgctagtataatatttatgtaaatgagg

SEQ ID NO: 69940 - DNA, 120 bp, Homo sapiens
  misc_feature: 765 for SV(C|O) and mtDNA
cccttatttaccgagaaagctcacaagaactgctaactcatgcccccatgtctaacaacatggctttctcaacttttaaaggataacagctatccattggtcttaggccccaaaaatttt

SEQ ID NO: 69941 - DNA, 120 bp, Homo sapiens; identical to SEQ ID NO: 54774
  misc_feature: 765 for SV(C|O) and mtDNA

SEQ ID NO: 69942 - DNA, 120 bp, Homo sapiens
  misc_feature: 765 for SV(C|O) and mtDNA
atggatgccccccaccctaccacacattcgaagaacccgtatacataaaatctagacaaaaaaggaaggaatcgaaccccccaaagctggtttcaagccaaccccatggcctccatgact

SEQ ID NO: 69943 - DNA, 120 bp, Homo sapiens; identical to SEQ ID NO: 54850
  misc_feature: 765 for SV(C|O) and mtDNA

SEQ ID NO: 69944 - DNA, 120 bp, Homo sapiens
  misc_feature: 765 for SV(C|O) and mtDNA
aggacatttaactaaaacccctacgcatttatatagaggagacaagtcgtaacatggtaagtgtactggaaagtgcacttggacgaaccagagtgtagcttaacacaaagcacccaactt

SEQ ID NO: 69945 - DNA, 120 bp, Homo sapiens
  misc_feature: 765 for SV(C|O) and mtDNA
aatttttggggcctaagaccaatggatagctgttatcctttaaaagttgagaaagccatgttgttagacatgggggcatgagttagcagttcttgtgagctttctcggtaaataaggggt

SEQ ID NO: 69946 - DNA, 120 bp, Homo sapiens
  misc_feature: 765 for SV(C|O) and mtDNA
aaaaatgttgagccgtagatgccgtcggaaatggtgaagggagactcgaagtactctgaggcttgtaggagggtaaaatagagacccagtaaaattgtaataagcagtgcttgaattatt

SEQ ID NO: 69947 - DNA, 120 bp, Homo sapiens; identical to SEQ ID NO: 58094
  misc_feature: 765 for SV(C|O) and mtDNA

SEQ ID NO: 69948 - DNA, 120 bp, Homo sapiens
  misc_feature: 764 for SV(C|O) and mtDNA
ttttatcagacatatttcttaggtttgagggggaatgctggagattgtaatgggtatggagacatatcatataagtaatgctagggtgagtggtaggaagttttttcataggaggtgtat

SEQ ID NO: 69949 - DNA, 120 bp, Homo sapiens
  misc_feature: 764 for SV(C|O) and mtDNA
tttccccctctattgatccccacctccaaatatctcatcaacaaccgactaatcaccacccaacaatgactaatcaaactaacctcaaaacaaatgataaccatacacaacactaaagga

SEQ ID NO: 69950 - DNA, 120 bp, Homo sapiens
  misc_feature: 764 for SV(C|O) and mtDNA
ttgatccccacctccaaatatctcatcaacaaccgactaatcaccacccaacaatgactaatcaaactaacctcaaaacaaatgataaccatacacaacactaaaggacgaacctgatct

SEQ ID NO: 69951 - DNA, 120 bp, Homo sapiens; identical to SEQ ID NO: 54896
  misc_feature: 764 for SV(C|O) and mtDNA

SEQ ID NO: 69952 - DNA, 120 bp, Homo sapiens
  misc_feature: 764 for SV(C|O) and mtDNA
tgttttcatgttacttatactaacattagttcttctatagggtgatagattggtccaattgggtgtgaggagttcagttatatgtttgggattttttaggtagtgggtgttgagcttgaa

SEQ ID NO: 69953 - DNA, 120 bp, Homo sapiens
  misc_feature: 764 for SV(C|O) and mtDNA
ttaaactatataccaattcggttcagtctaatcctttttgtagtcactcataggccagacttagggctaggatgatgattaataagagggatgacataactattagtggtaggttagttg

SEQ ID NO: 69954 - DNA, 120 bp, Homo sapiens
  misc_feature: 764 for SV(C|O) and mtDNA
acaaaccccattactaaacccacactcaacagaaacaaagcatacatcattattctcgcacggactacaaccacgaccaatgatatgaaaaaccatcgttgtatttcaactacaagaaca

SEQ ID NO: 69955 - DNA, 120 bp, Homo sapiens
  misc_feature: 764 for SV(C|O) and mtDNA
tggtggagttaaagactttttctctgatttgtccttggaaaaaggttttcatctccggtttacaagactggtgtattagtttatactacaaggacaggcccatttgagtattttgttttc

SEQ ID NO: 69956 - DNA, 120 bp, Homo sapiens
  misc_feature: 764 for SV(C|O) and mtDNA
tattcatccctgtagcattattcgttacatggtccatcatagaattctcactgtgatatataaactcagacccaaacattaatcagttcttcaaatatctactcatcttcctaattacca

SEQ ID NO: 69957 - DNA, 120 bp, Homo sapiens; identical to SEQ ID NO: 59874
  misc_feature: 764 for SV(C|O) and mtDNA

SEQ ID NO: 69958 - DNA, 120 bp, Homo sapiens
  misc_feature: 764 for SV(C|O) and mtDNA
cggaatgccccgacgttactcggactaccccgatgcatacaccacatgaaacatcctatcatctgtaggctcattcatttctctaacagcagtaatattaataattttcatgatttgaga

SEQ ID NO: 69959 - DNA, 120 bp, Homo sapiens
  misc_feature: 764 for SV(C|O) and mtDNA
tccgtgcgagaataatgatgtatgctttgtttctgttgagtgtgggtttagtaatggggtttgtggggttttcttctaagccttctcctatttatgggggtttagtattgattgttagcg

SEQ ID NO: 69960 - DNA, 120 bp, Homo sapiens
  misc_feature: 764 for SV(C|O) and mtDNA
ccccaaacccactccaccttactaccagacaaccttagccaaaccatttacccaaataaagtataggcgatagaaattgaaacctggcgcaatagatatagtaccgcaagggaaagatga

SEQ ID NO: 69961 - DNA, 120 bp, Homo sapiens
  misc_feature: 764 for SV(C|O) and mtDNA
tcagacccaaacattaatcagttcttcaaatatctactcatcttcctaattaccatactaatcttagttaccgctaacaacctattccaactgttcatcggctgagagggcgtaggaatt

SEQ ID NO: 69962 - DNA, 120 bp, Homo sapiens
  misc_feature: 764 for SV(C|O) and mtDNA
aagtatttcctcacgcaagcaaccgcatccataatccttctaatagctatcctcttcaacaatatactctccggacaatgaaccataaccaatactaccaatcaatactcatcattaata

SEQ ID NO: 69963 - DNA, 120 bp, Homo sapiens; identical to SEQ ID NO: 57996
  misc_feature: 764 for SV(C|O) and mtDNA

SEQ ID NO: 69964 - DNA, 120 bp, Homo sapiens; identical to SEQ ID NO: 60757
  misc_feature: 764 for SV(C|O) and mtDNA

SEQ ID NO: 69965 - DNA, 120 bp, Homo sapiens; identical to SEQ ID NO: 59431
  misc_feature: 764 for SV(C|O) and mtDNA

SEQ ID NO: 69966 - DNA, 120 bp, Homo sapiens
  misc_feature: 764 for SV(C|O) and mtDNA
gggttttcttctaagccttctcctatttatgggggtttagtattgattgttagcggtgtggtcgggtgtgttattattctgaattttgggggaggttatatgggtttaatagttttttta

SEQ ID NO: 69967 - DNA, 120 bp, Homo sapiens; identical to SEQ ID NO: 52557
  misc_feature: 764 for SV(C|O) and mtDNA

SEQ ID NO: 69968 - DNA, 120 bp, Homo sapiens
  misc_feature: 764 for SV(C|O) and mtDNA
gcagtaatattaataattttcatgatttgagaagccttcgcttcgaagcgaaaagtcctaatagtagaagaaccctccataaacctggagtgactatatggatgccccccaccctaccac

SEQ ID NO: 69969 - DNA, 120 bp, Homo sapiens; identical to SEQ ID NO: 57547
  misc_feature: 764 for SV(C|O) and mtDNA

SEQ ID NO: 69970 - DNA, 120 bp, Homo sapiens
  misc_feature: 764 for SV(C|O) and mtDNA
aatcagagaaaaagtctttaactccaccattagcacccaaagctaagattctaatttaaactattctctgttctttcatggggaagcagatttgggtgccacccaagtattgactcaccc

SEQ ID NO: 69971 - DNA, 120 bp, Homo sapiens; identical to SEQ ID NO: 52602
  misc_feature: 764 for SV(C|O) and mtDNA

SEQ ID NO: 69972 - DNA, 120 bp, Homo sapiens
  misc_feature: 764 for SV(C|O) and mtDNA
gccccaaacccactccaccttactaccagacaaccttagccaaaccatttacccaaataaagtataggcgatagaaattgaaacctggcgcaatagatatagtaccgcaagggaaagatg

SEQ ID NO: 69973 - DNA, 120 bp, Homo sapiens
  misc_feature: 764 for SV(C|O) and mtDNA
gaggatggggattattgctaggatgaggatggatagtaatagggcaaggacgcctcctagtttgttagggacggatcggagaattgtgtaggcgaataggaaatatcattcgggcttgat

SEQ ID NO: 69974 - DNA, 120 bp, Homo sapiens
  misc_feature: 764 for SV(C|O) and mtDNA
caaaacgaatgatttcgactcattaaattatgataatcatatttaccaaatgcccctcatttacataaatattatactagcatttaccatctcacttctaggaatactagtataccgctc

SEQ ID NO: 69975 - DNA, 120 bp, Homo sapiens
  misc_feature: 764 for SV(C|O) and mtDNA
cttatgactccctaaagcccatgtcgaagcccccatcgctgggtcaatagtacttgccgcagtactcttaaaactaggcggctatggtataatacgcctcacactcattctcaaccccct

SEQ ID NO: 69976 - DNA, 120 bp, Homo sapiens
  misc_feature: 764 for SV(C|O) and mtDNA
aatgttgagccgtagatgccgtcggaaatggtgaagggagactcgaagtactctgaggcttgtaggagggtaaaatagagacccagtaaaattgtaataagcagtgcttgaattatttgg

SEQ ID NO: 69977 - DNA, 120 bp, Homo sapiens
  misc_feature: 764 for SV(C|O) and mtDNA
acattactgccagccaccatgaatattgtacggtaccataaatacttgaccacctgtagtacataaaaacccaatccacatcaaaaccccctccccatgcttacaagcaagtacagcaat

SEQ ID NO: 69978 - DNA, 120 bp, Homo sapiens; identical to SEQ ID NO: 53616
  misc_feature: 764 for SV(C|O) and mtDNA

SEQ ID NO: 69979 - DNA, 120 bp, Homo sapiens
  misc_feature: 764 for SV(C|O) and mtDNA
aatgctaaaactaatcgtcccaacaattatattactaccactgacatgactttccaaaaaacacataatttgaatcaacacaaccacccacagcctaattattagcatcatccctctact

SEQ ID NO: 69980 - DNA, 120 bp, Homo sapiens
  misc_feature: 764 for SV(C|O) and mtDNA
agctttgggtgctaatggtggagttaaagactttttctctgatttgtccttggaaaaaggttttcatctccggtttacaagactggtgtattagtttatactacaaggacaggcccattt

SEQ ID NO: 69981 - DNA, 120 bp, Homo sapiens
  misc_feature: 764 for SV(C|O) and mtDNA
accctaggctcactaaacattctactactcactctcactgcccaagaactatcaaactcctgagccaacaacttaatatgactagcttacacaatagcttttatagtaaagatacctctt

SEQ ID NO: 69982 - DNA, 120 bp, Homo sapiens; identical to SEQ ID NO: 55013
  misc_feature: 763 for SV(C|O) and mtDNA

SEQ ID NO: 69983 - DNA, 120 bp, Homo sapiens
  misc_feature: 763 for SV(C|O) and mtDNA
tttattatcagtctcttccccacaacaatattcatgtgcctagaccaagaagttattatctcgaactgacactgagccacaacccaaacaacccagctctccctaagcttcaaactagac

SEQ ID NO: 69984 - DNA, 120 bp, Homo sapiens; identical to SEQ ID NO: 53440
  misc_feature: 763 for SV(C|O) and mtDNA

SEQ ID NO: 69985 - DNA, 120 bp, Homo sapiens
  misc_feature: 763 for SV(C|O) and mtDNA
ttgtagtccgtgcgagaataatgatgtatgctttgtttctgttgagtgtgggtttagtaatggggtttgtggggttttcttctaagccttctcctatttatgggggtttagtattgattg

SEQ ID NO: 69986 - DNA, 120 bp, Homo sapiens
  misc_feature: 763 for SV(C|O) and mtDNA
catcgggatgtcctgatccaacatcgaggtcgtaaaccctattgttgatatggactctagaataggattgcgctgttatccctagggtaacttgttccgttggtcaagttattggatcaa

SEQ ID NO: 69987 - DNA, 120 bp, Homo sapiens; identical to SEQ ID NO: 60475
  misc_feature: 763 for SV(C|O) and mtDNA

SEQ ID NO: 69988 - DNA, 120 bp, Homo sapiens
  misc_feature: 763 for SV(C|O) and mtDNA
cctggagtgactatatggatgccccccaccctaccacacattcgaagaacccgtatacataaaatctagacaaaaaaggaaggaatcgaaccccccaaagctggtttcaagccaacccca

SEQ ID NO: 69989 - DNA, 120 bp, Homo sapiens; identical to SEQ ID NO: 54362
  misc_feature: 763 for SV(C|O) and mtDNA

SEQ ID NO: 69990 - DNA, 120 bp, Homo sapiens
  misc_feature: 763 for SV(C|O) and mtDNA
tcgttacatggtccatcatagaattctcactgtgatatataaactcagacccaaacattaatcagttcttcaaatatctactcatcttcctaattaccatactaatcttagttaccgcta

SEQ ID NO: 69991 - DNA, 120 bp, Homo sapiens
  misc_feature: 763 for SV(C|O) and mtDNA
tatttccccctctattgatccccacctccaaatatctcatcaacaaccgactaatcaccacccaacaatgactaatcaaactaacctcaaaacaaatgataaccatacacaacactaaag

SEQ ID NO: 69992 - DNA, 120 bp, Homo sapiens
  misc_feature: 763 for SV(C|O) and mtDNA
tatttatgtaaatgaggggcatttggtaaatatgattatcataatttaatgagtcgaaatcattcgttttgtttaaactatataccaattcggttcagtctaatcctttttgtagtcact

SEQ ID NO: 69993 - DNA, 120 bp, Homo sapiens
  misc_feature: 763 for SV(C|O) and mtDNA
tatggatgccccccaccctaccacacattcgaagaacccgtatacataaaatctagacaaaaaaggaaggaatcgaaccccccaaagctggtttcaagccaaccccatggcctccatgac

SEQ ID NO: 69994 - DNA, 120 bp, Homo sapiens
  misc_feature: 763 for SV(C|O) and mtDNA
taggtttggtctagggtgtagcctgagaataggggaaatcagtgaatgaagcctcctatgatggcaaatacagctcctattgataggacatagtggaagtgagctacaacgtagtacgtg

SEQ ID NO: 69995 - DNA, 120 bp, Homo sapiens
  misc_feature: 763 for SV(C|O) and mtDNA
tactgcggcaagtactattgacccagcgatgggggcttcgacatgggctttagggagtcataagtggagtccgtaaagaggtatctttactataaaagctattgtgtaagctagtcatat

SEQ ID NO: 69996 - DNA, 120 bp, Homo sapiens
  misc_feature: 763 for SV(C|O) and mtDNA
atcaagtatttcctcacgcaagcaaccgcatccataatccttctaatagctatcctcttcaacaatatactctccggacaatgaaccataaccaatactaccaatcaatactcatcatta

SEQ ID NO: 69997 - DNA, 120 bp, Homo sapiens; identical to SEQ ID NO: 54790
  misc_feature: 763 for SV(C|O) and mtDNA

SEQ ID NO: 69998 - DNA, 120 bp, Homo sapiens
  misc_feature: 763 for SV(C|O) and mtDNA
gtatttcctcacgcaagcaaccgcatccataatccttctaatagctatcctcttcaacaatatactctccggacaatgaaccataaccaatactaccaatcaatactcatcattaataat

SEQ ID NO: 69999 - DNA, 120 bp, Homo sapiens
  misc_feature: 763 for SV(C|O) and mtDNA
gaaggcttagaagaaaaccccacaaaccccattactaaacccacactcaacagaaacaaagcatacatcattattctcgcacggactacaaccacgaccaatgatatgaaaaaccatcgt

SEQ ID NO: 70000 - DNA, 120 bp, Homo sapiens; identical to SEQ ID NO: 57249
  misc_feature: 763 for SV(C|O) and mtDNA

SEQ ID NO: 70001 - DNA, 120 bp, Homo sapiens
  misc_feature: 763 for SV(C|O) and mtDNA
ctcagacccaaacattaatcagttcttcaaatatctactcatcttcctaattaccatactaatcttagttaccgctaacaacctattccaactgttcatcggctgagagggcgtaggaat

SEQ ID NO: 70002 - DNA, 120 bp, Homo sapiens
  misc_feature: 763 for SV(C|O) and mtDNA
cgttgttagatatggggagtagtgtgattgaggtggagtagattaggcgtaggtagaagtagaggttaaggagggtgatggtggctatgatggtggggatgatgaggctattgttttttg

SEQ ID NO: 70003 - DNA, 120 bp, Homo sapiens
  misc_feature: 763 for SV(C|O) and mtDNA
cctaagaccaatggatagctgttatcctttaaaagttgagaaagccatgttgttagacatgggggcatgagttagcagttcttgtgagctttctcggtaaataaggggtcgtaagcctct

SEQ ID NO: 70004 - DNA, 120 bp, Homo sapiens
  misc_feature: 763 for SV(C|O) and mtDNA
atggttgtctttggatatactacagcgatggctattgaggagtatcctgaggcatgggggtcaggggttgaggtcttggtgagtgttttagtggggttagcgatggaggtaggattggtg

SEQ ID NO: 70005 - DNA, 120 bp, Homo sapiens
  misc_feature: 762 for SV(C|O) and mtDNA
ttgttccgttggtcaagttattggatcaattgagtatagtagttcgctttgactggtgaagtcttagcatgtactgctcggaggttgggttctgctccgaggtcgccccaaccgaaattt

SEQ ID NO: 70006 - DNA, 120 bp, Homo sapiens
  misc_feature: 762 for SV(C|O) and mtDNA
ttgagccgtagatgccgtcggaaatggtgaagggagactcgaagtactctgaggcttgtaggagggtaaaatagagacccagtaaaattgtaataagcagtgcttgaattatttggtttc

SEQ ID NO: 70007 - DNA, 120 bp, Homo sapiens
  misc_feature: 762 for SV(C|O) and mtDNA
gggcgttgattagtagtagttactggttgaacattgtttgttggtgtatatattgtaattgagattgctcgggggaataggttatgtgattaggagtagggttaggatgagtgggaagaa

SEQ ID NO: 70008 - DNA, 120 bp, Homo sapiens
  misc_feature: 762 for SV(C|O) and mtDNA
ttaatcagttcttcaaatatctactcatcttcctaattaccatactaatcttagttaccgctaacaacctattccaactgttcatcggctgagagggcgtaggaattatatccttcttgc

SEQ ID NO: 70009 - DNA, 120 bp, Homo sapiens
  misc_feature: 762 for SV(C|O) and mtDNA
tgatggttgtctttggatatactacagcgatggctattgaggagtatcctgaggcatgggggtcaggggttgaggtcttggtgagtgttttagtggggttagcgatggaggtaggattgg

SEQ ID NO: 70010 - DNA, 120 bp, Homo sapiens
  misc_feature: 762 for SV(C|O) and mtDNA
aaaatcccaaacatataactgaactcctcacacccaattggaccaatctatcaccctatagaagaactaatgttagtataagtaacatgaaaacattctcctccgcataagcctgcgtca

SEQ ID NO: 70011 - DNA, 120 bp, Homo sapiens; identical to SEQ ID NO: 55066
  misc_feature: 762 for SV(C|O) and mtDNA

SEQ ID NO: 70012 - DNA, 120 bp, Homo sapiens
  misc_feature: 762 for SV(C|O) and mtDNA
tcctaccactcaccctagcattacttatatgatatgtctccatacccattacaatctccagcattccccctcaaacctaagaaatatgtctgataaaagagttactttgatagagtaaat

SEQ ID NO: 70013 - DNA, 120 bp, Homo sapiens
  misc_feature: 762 for SV(C|O) and mtDNA
tcatcgacctccccaccccatccaacatctccgcatgatgaaacttcggctcactccttggcgcctgcctgatcctccaaatcaccacaggactattcctagccatgcactactcaccag

SEQ ID NO: 70014 - DNA, 120 bp, Homo sapiens
  misc_feature: 762 for SV(C|O) and mtDNA
actgtcattttatttttacgttgttagatatggggagtagtgtgattgaggtggagtagattaggcgtaggtagaagtagaggttaaggagggtgatggtggctatgatggtggggatga

SEQ ID NO: 70015 - DNA, 120 bp, Homo sapiens
  misc_feature: 762 for SV(C|O) and mtDNA
tatgaaaaaacttcctaccactcaccctagcattacttatatgatatgtctccatacccattacaatctccagcattccccctcaaacctaagaaatatgtctgataaaagagttacttt

SEQ ID NO: 70016 - DNA, 120 bp, Homo sapiens
  misc_feature: 762 for SV(C|O) and mtDNA
tacttcgagtctcccttcaccatttccgacggcatctacggctcaacattttttgtagccacaggcttccacggacttcacgtcattattggctcaactttcctcactatctgcttcatc

SEQ ID NO: 70017 - DNA, 120 bp, Homo sapiens; identical to SEQ ID NO: 58659
  misc_feature: 762 for SV(C|O) and mtDNA

SEQ ID NO: 70018 - DNA, 120 bp, Homo sapiens
  misc_feature: 762 for SV(C|O) and mtDNA
ccacctttattatcagtctcttccccacaacaatattcatgtgcctagaccaagaagttattatctcgaactgacactgagccacaacccaaacaacccagctctccctaagcttcaaac

SEQ ID NO: 70019 - DNA, 120 bp, Homo sapiens
  misc_feature: 762 for SV(C|O) and mtDNA
aaaggacatttaactaaaacccctacgcatttatatagaggagacaagtcgtaacatggtaagtgtactggaaagtgcacttggacgaaccagagtgtagcttaacacaaagcacccaac

SEQ ID NO: 70020 - DNA, 120 bp, Homo sapiens
  misc_feature: 762 for SV(C|O) and mtDNA
accatctcacttctaggaatactagtataccgctcacacctcatatcctccctactatgcctagaaggaataatactatcactgttcattatagctactctcataaccctcaacacccac

SEQ ID NO: 70021 - DNA, 120 bp, Homo sapiens
  misc_feature: 762 for SV(C|O) and mtDNA
gtagtccgtgcgagaataatgatgtatgctttgtttctgttgagtgtgggtttagtaatggggtttgtggggttttcttctaagccttctcctatttatgggggtttagtattgattgtt

SEQ ID NO: 70022 - DNA, 120 bp, Homo sapiens; identical to SEQ ID NO: 56174
  misc_feature: 762 for SV(C|O) and mtDNA

SEQ ID NO: 70023 - DNA, 120 bp, Homo sapiens
  misc_feature: 762 for SV(C|O) and mtDNA
acgtaggtgcgataaataataggatgaggcaggaatcaaagacagatactgcgacatagggtgctccggctccagcgtctcgcaatgctatcgcgtgcacaccccccagacgaaaatacc

SEQ ID NO: 70024 - DNA, 120 bp, Homo sapiens
  misc_feature: 762 for SV(C|O) and mtDNA
ggagacatacagaaatagtcaaaccacgtctacaaaatgccagtatcaggcggcggcttcgaagccaaagtgatgtttggatgtaaagtgaaatattagttggcggatgaagcagatagt

SEQ ID NO: 70025 - DNA, 120 bp, Homo sapiens
  misc_feature: 762 for SV(C|O) and mtDNA
gctttaatttattaatgcaaacagtacctaacaaacccacaggtcctaaactaccaaacctgcattaaaaatttcggttggggcgacctcggagcagaacccaacctccgagcagtacat

SEQ ID NO: 70026 - DNA, 120 bp, Homo sapiens
  misc_feature: 762 for SV(C|O) and mtDNA
gctatcaccaggctcggtaggtttgtcgcctctacctataaatcttcccactattttgctacatagacgggtgtgctcttttagctgttcttaggtagctcgtctggtttcgggggtctt

SEQ ID NO: 70027 - DNA, 120 bp, Homo sapiens
  misc_feature: 762 for SV(C|O) and mtDNA
gatttgtagggagattagtatagagaggtagagtttttttcgtgatagtggttcactggataagtggcgttggcttgccatgattgtgaggggtaggagtcaggtagttagtattaggag

SEQ ID NO: 70028 - DNA, 120 bp, Homo sapiens
  misc_feature: 762 for SV(C|O) and mtDNA
aagaacccgtatacataaaatctagacaaaaaaggaaggaatcgaaccccccaaagctggtttcaagccaaccccatggcctccatgactttttcaaaaaggtattagaaaaaccatttc

SEQ ID NO: 70029 - DNA, 120 bp, Homo sapiens; identical to SEQ ID NO: 52527
  misc_feature: 762 for SV(C|O) and mtDNA

SEQ ID NO: 70030 - DNA, 120 bp, Homo sapiens; identical to SEQ ID NO: 59594
  misc_feature: 762 for SV(C|O) and mtDNA

SEQ ID NO: 70031 - DNA, 120 bp, Homo sapiens; identical to SEQ ID NO: 57527
  misc_feature: 762 for SV(C|O) and mtDNA

SEQ ID NO: 70032 - DNA, 120 bp, Homo sapiens; identical to SEQ ID NO: 58789
  misc_feature: 762 for SV(C|O) and mtDNA

SEQ ID NO: 70033 - DNA, 120 bp, Homo sapiens
  misc_feature: 762 for SV(C|O) and mtDNA
ccatctcacttctaggaatactagtataccgctcacacctcatatcctccctactatgcctagaaggaataatactatcactgttcattatagctactctcataaccctcaacacccact

SEQ ID NO: 70034 - DNA, 120 bp, Homo sapiens; identical to SEQ ID NO: 52927
  misc_feature: 762 for SV(C|O) and mtDNA

SEQ ID NO: 70035 - DNA, 120 bp, Homo sapiens
  misc_feature: 762 for SV(C|O) and mtDNA
atttttctgagccttttaccactccagcctagcccctaccccccaattaggagggcactggcccccaacaggcatcaccccgctaaatcccctagaagtcccactcctaaacacatccgt

SEQ ID NO: 70036 - DNA, 120 bp, Homo sapiens; identical to SEQ ID NO: 57888
  misc_feature: 762 for SV(C|O) and mtDNA

SEQ ID NO: 70037 - DNA, 120 bp, Homo sapiens
  misc_feature: 762 for SV(C|O) and mtDNA
aaggacatttaactaaaacccctacgcatttatatagaggagacaagtcgtaacatggtaagtgtactggaaagtgcacttggacgaaccagagtgtagcttaacacaaagcacccaact

SEQ ID NO: 70038 - DNA, 120 bp, Homo sapiens
  misc_feature: 761 for SV(C|O) and mtDNA
aaataggagaaggcttagaagaaaaccccacaaaccccattactaaacccacactcaacagaaacaaagcatacatcattattctcgcacggactacaaccacgaccaatgatatgaaaa

SEQ ID NO: 70039 - DNA, 120 bp, Homo sapiens
  misc_feature: 761 for SV(C|O) and mtDNA
ttctgaggtaataaataggattatcccgtatcgaaggcctttttggacaggtggtgtgtggtggccttggtatgtgctttctcgtgttacatcgcgccatcattggtatatggttagtgt

SEQ ID NO: 70040 - DNA, 120 bp, Homo sapiens
  misc_feature: 761 for SV(C|O) and mtDNA
ttcgttacatggtccatcatagaattctcactgtgatatataaactcagacccaaacattaatcagttcttcaaatatctactcatcttcctaattaccatactaatcttagttaccgct

SEQ ID NO: 70041 - DNA, 120 bp, Homo sapiens
  misc_feature: 761 for SV(C|O) and mtDNA
cgttacatggtccatcatagaattctcactgtgatatataaactcagacccaaacattaatcagttcttcaaatatctactcatcttcctaattaccatactaatcttagttaccgctaa

SEQ ID NO: 70042 - DNA, 120 bp, Homo sapiens
  misc_feature: 761 for SV(C|O) and mtDNA
ttactttgatagagtaaataataggagcttaaacccccttatttctaggactatgagaatcgaacccatccctgagaatccaaaattctccgtgccacctatcacaccccatcctaaagt

SEQ ID NO: 70043 - DNA, 120 bp, Homo sapiens; identical to SEQ ID NO: 57535
  misc_feature: 761 for SV(C|O) and mtDNA

SEQ ID NO: 70044 - DNA, 120 bp, Homo sapiens
  misc_feature: 761 for SV(C|O) and mtDNA
ggaaggcgctttgtgaagtaggccttatttctcttgtcctttcgtacagggaggaatttgaagtagatagaaaccgacctggattactccggtctgaactcagatcacgtaggactttaa

SEQ ID NO: 70045 - DNA, 120 bp, Homo sapiens
  misc_feature: 761 for SV(C|O) and mtDNA
cagtaatattaataattttcatgatttgagaagccttcgcttcgaagcgaaaagtcctaatagtagaagaaccctccataaacctggagtgactatatggatgccccccaccctaccaca

SEQ ID NO: 70046 - DNA, 120 bp, Homo sapiens; identical to SEQ ID NO: 53369
  misc_feature: 761 for SV(C|O) and mtDNA

SEQ ID NO: 70047 - DNA, 120 bp, Homo sapiens
  misc_feature: 761 for SV(C|O) and mtDNA
tgtagggagattagtatagagaggtagagtttttttcgtgatagtggttcactggataagtggcgttggcttgccatgattgtgaggggtaggagtcaggtagttagtattaggaggggg

SEQ ID NO: 70048 - DNA, 120 bp, Homo sapiens
  misc_feature: 761 for SV(C|O) and mtDNA
tgtagaataggaagtatgtgcctgcgttcaggcgttctggctggttgcctcatcgggtgatgatagccaaggtggggataagtgtggtttcgaagaagatataaaatatgattagttctg

SEQ ID NO: 70049 - DNA, 120 bp, Homo sapiens
  misc_feature: 761 for SV(C|O) and mtDNA
tggggaagcagatttgggtgccacccaagtattgactcacccatcaacaaccgctatgtaattcgtacattactgccagccaccatgaatattgtacggtaccataaatacttgaccacc

SEQ ID NO: 70050 - DNA, 120 bp, Homo sapiens
  misc_feature: 761 for SV(C|O) and mtDNA
tgctatgtacggtaaatggctttatgtactatgtgctgttaagggtgagtaggtttgttggtatcctagtgggtgaggggtggctttggagttgcagttgatgtgtgatagttgagggtt

SEQ ID NO: 70051 - DNA, 120 bp, Homo sapiens
  misc_feature: 761 for SV(C|O) and mtDNA
tcgggcgtatcatcaactgatgagcaagaaggatataattcctacgccctctcagccgatgaacagttggaataggttgttagcggtaactaagattagtatggtaattaggaagatgag

SEQ ID NO: 70052 - DNA, 120 bp, Homo sapiens
  misc_feature: 761 for SV(C|O) and mtDNA
tcaaaaccccctccccatgcttacaagcaagtacagcaatcaaccctcaactatcacacatcaactgcaactccaaagccacccctcacccactaggataccaacaaacctactcaccct

SEQ ID NO: 70053 - DNA, 120 bp, Homo sapiens
  misc_feature: 761 for SV(C|O) and mtDNA
tagctttgggtgctaatggtggagttaaagactttttctctgatttgtccttggaaaaaggttttcatctccggtttacaagactggtgtattagtttatactacaaggacaggcccatt

SEQ ID NO: 70054 - DNA, 120 bp, Homo sapiens
  misc_feature: 761 for SV(C|O) and mtDNA
tacgttgttagatatggggagtagtgtgattgaggtggagtagattaggcgtaggtagaagtagaggttaaggagggtgatggtggctatgatggtggggatgatgaggctattgttttt

SEQ ID NO: 70055 - DNA, 120 bp, Homo sapiens
  misc_feature: 761 for SV(C|O) and mtDNA
cctagaatttttcgttcggtaagcattaggaatgccattgcgattagaatgggtacaatgaggagtaggaggttggccatgggtatgttgttaagaagaggaattgaacctctgactgta

SEQ ID NO: 70056 - DNA, 120 bp, Homo sapiens
  misc_feature: 761 for SV(C|O) and mtDNA
taatcacttgttccttaaatagggacctgtatgaatggctccacgagggttcagctgtctcttacttttaaccagtgaaattgacctgcccgtgaagaggcgggcatgacacagcaagac

SEQ ID NO: 70057 - DNA, 120 bp, Homo sapiens
  misc_feature: 761 for SV(C|O) and mtDNA
cctaggctcactaaacattctactactcactctcactgcccaagaactatcaaactcctgagccaacaacttaatatgactagcttacacaatagcttttatagtaaagatacctcttta

SEQ ID NO: 70058 - DNA, 120 bp, Homo sapiens; identical to SEQ ID NO: 52698
  misc_feature: 761 for SV(C|O) and mtDNA

SEQ ID NO: 70059 - DNA, 120 bp, Homo sapiens; identical to SEQ ID NO: 52909
  misc_feature: 761 for SV(C|O) and mtDNA

SEQ ID NO: 70060 - DNA, 120 bp, Homo sapiens
  misc_feature: 761 for SV(C|O) and mtDNA
gtccgtggaagcctgtggctacaaaaaatgttgagccgtagatgccgtcggaaatggtgaagggagactcgaagtactctgaggcttgtaggagggtaaaatagagacccagtaaaattg

SEQ ID NO: 70061 - DNA, 120 bp, Homo sapiens
  misc_feature: 761 for SV(C|O) and mtDNA
gtccgtgcgagaataatgatgtatgctttgtttctgttgagtgtgggtttagtaatggggtttgtggggttttcttctaagccttctcctatttatgggggtttagtattgattgttagc

SEQ ID NO: 70062 - DNA, 120 bp, Homo sapiens
  misc_feature: 761 for SV(C|O) and mtDNA
aaaaatttaacacccatagtaggcctaaaagcagccaccaattaagaaagcgttcaagctcaacacccactacctaaaaaatcccaaacatataactgaactcctcacacccaattggac

SEQ ID NO: 70063 - DNA, 120 bp, Homo sapiens; identical to SEQ ID NO: 53672
  misc_feature: 761 for SV(C|O) and mtDNA

SEQ ID NO: 70064 - DNA, 120 bp, Homo sapiens
  misc_feature: 761 for SV(C|O) and mtDNA
acagcagtaatattaataattttcatgatttgagaagccttcgcttcgaagcgaaaagtcctaatagtagaagaaccctccataaacctggagtgactatatggatgccccccaccctac

SEQ ID NO: 70065 - DNA, 120 bp, Homo sapiens
  misc_feature: 761 for SV(C|O) and mtDNA
gtagaataggaagtatgtgcctgcgttcaggcgttctggctggttgcctcatcgggtgatgatagccaaggtggggataagtgtggtttcgaagaagatataaaatatgattagttctgt

SEQ ID NO: 70066 - DNA, 120 bp, Homo sapiens
  misc_feature: 761 for SV(C|O) and mtDNA
ggttgtctttggatatactacagcgatggctattgaggagtatcctgaggcatgggggtcaggggttgaggtcttggtgagtgttttagtggggttagcgatggaggtaggattggtgct

SEQ ID NO: 70067 - DNA, 120 bp, Homo sapiens
  misc_feature: 761 for SV(C|O) and mtDNA
acttatgactccctaaagcccatgtcgaagcccccatcgctgggtcaatagtacttgccgcagtactcttaaaactaggcggctatggtataatacgcctcacactcattctcaaccccc

SEQ ID NO: 70068 - DNA, 120 bp, Homo sapiens
  misc_feature: 761 for SV(C|O) and mtDNA
ggcatctgctcgggcgtatcatcaactgatgagcaagaaggatataattcctacgccctctcagccgatgaacagttggaataggttgttagcggtaactaagattagtatggtaattag

SEQ ID NO: 70069 - DNA, 120 bp, Homo sapiens
  misc_feature: 761 for SV(C|O) and mtDNA
ggagttaaagactttttctctgatttgtccttggaaaaaggttttcatctccggtttacaagactggtgtattagtttatactacaaggacaggcccatttgagtattttgttttcaatt

SEQ ID NO: 70070 - DNA, 120 bp, Homo sapiens
  misc_feature: 761 for SV(C|O) and mtDNA
attgatccccacctccaaatatctcatcaacaaccgactaatcaccacccaacaatgactaatcaaactaacctcaaaacaaatgataaccatacacaacactaaaggacgaacctgatc

SEQ ID NO: 70071 - DNA, 120 bp, Homo sapiens
  misc_feature: 761 for SV(C|O) and mtDNA
gaaggcgctttgtgaagtaggccttatttctcttgtcctttcgtacagggaggaatttgaagtagatagaaaccgacctggattactccggtctgaactcagatcacgtaggactttaat

SEQ ID NO: 70072 - DNA, 120 bp, Homo sapiens
  misc_feature: 761 for SV(C|O) and mtDNA
cttgttccgttggtcaagttattggatcaattgagtatagtagttcgctttgactggtgaagtcttagcatgtactgctcggaggttgggttctgctccgaggtcgccccaaccgaaatt

SEQ ID NO: 70073 - DNA, 120 bp, Homo sapiens; identical to SEQ ID NO: 54585
  misc_feature: 761 for SV(C|O) and mtDNA

SEQ ID NO: 70074 - DNA, 120 bp, Homo sapiens
  misc_feature: 761 for SV(C|O) and mtDNA
atcattcgttttgtttaaactatataccaattcggttcagtctaatcctttttgtagtcactcataggccagacttagggctaggatgatgattaataagagggatgacataactattag

SEQ ID NO: 70075 - DNA, 120 bp, Homo sapiens
  misc_feature: 761 for SV(C|O) and mtDNA
cctcacgcaagcaaccgcatccataatccttctaatagctatcctcttcaacaatatactctccggacaatgaaccataaccaatactaccaatcaatactcatcattaataatcataat

SEQ ID NO: 70076 - DNA, 120 bp, Homo sapiens
  misc_feature: 761 for SV(C|O) and mtDNA
acttgttccgttggtcaagttattggatcaattgagtatagtagttcgctttgactggtgaagtcttagcatgtactgctcggaggttgggttctgctccgaggtcgccccaaccgaaat

SEQ ID NO: 70077 - DNA, 120 bp, Homo sapiens
  misc_feature: 761 for SV(C|O) and mtDNA
acaaaacgaatgatttcgactcattaaattatgataatcatatttaccaaatgcccctcatttacataaatattatactagcatttaccatctcacttctaggaatactagtataccgct

SEQ ID NO: 70078 - DNA, 120 bp, Homo sapiens; identical to SEQ ID NO: 55282
  misc_feature: 761 for SV(C|O) and mtDNA

SEQ ID NO: 70079 - DNA, 120 bp, Homo sapiens
  misc_feature: 760 for SV(C|O) and mtDNA
ctatttccccctctattgatccccacctccaaatatctcatcaacaaccgactaatcaccacccaacaatgactaatcaaactaacctcaaaacaaatgataaccatacacaacactaaa

SEQ ID NO: 70080 - DNA, 120 bp, Homo sapiens
  misc_feature: 760 for SV(C|O) and mtDNA
ttgttagatatggggagtagtgtgattgaggtggagtagattaggcgtaggtagaagtagaggttaaggagggtgatggtggctatgatggtggggatgatgaggctattgttttttgtg

SEQ ID NO: 70081 - DNA, 120 bp, Homo sapiens
  misc_feature: 760 for SV(C|O) and mtDNA
caatctatcaccctatagaagaactaatgttagtataagtaacatgaaaacattctcctccgcataagcctgcgtcagattaaaacactgaactgacaattaacagcccaatatctacaa

SEQ ID NO: 70082 - DNA, 120 bp, Homo sapiens
  misc_feature: 760 for SV(C|O) and mtDNA
ttcgagtctcccttcaccatttccgacggcatctacggctcaacattttttgtagccacaggcttccacggacttcacgtcattattggctcaactttcctcactatctgcttcatccgc

SEQ ID NO: 70083 - DNA, 120 bp, Homo sapiens
  misc_feature: 760 for SV(C|O) and mtDNA
agtatttcctcacgcaagcaaccgcatccataatccttctaatagctatcctcttcaacaatatactctccggacaatgaaccataaccaatactaccaatcaatactcatcattaataa

SEQ ID NO: 70084 - DNA, 120 bp, Homo sapiens
  misc_feature: 760 for SV(C|O) and mtDNA
tcttccccacaacaatattcatgtgcctagaccaagaagttattatctcgaactgacactgagccacaacccaaacaacccagctctccctaagcttcaaactagactacttctccataa

SEQ ID NO: 70085 - DNA, 120 bp, Homo sapiens
  misc_feature: 760 for SV(C|O) and mtDNA
ctagaatttttcgttcggtaagcattaggaatgccattgcgattagaatgggtacaatgaggagtaggaggttggccatgggtatgttgttaagaagaggaattgaacctctgactgtaa

SEQ ID NO: 70086 - DNA, 120 bp, Homo sapiens
  misc_feature: 760 for SV(C|O) and mtDNA
tgttccgttggtcaagttattggatcaattgagtatagtagttcgctttgactggtgaagtcttagcatgtactgctcggaggttgggttctgctccgaggtcgccccaaccgaaatttt

SEQ ID NO: 70087 - DNA, 120 bp, Homo sapiens; identical to SEQ ID NO: 55459
  misc_feature: 760 for SV(C|O) and mtDNA

SEQ ID NO: 70088 - DNA, 120 bp, Homo sapiens
  misc_feature: 760 for SV(C|O) and mtDNA
tgtcattttatttttacgttgttagatatggggagtagtgtgattgaggtggagtagattaggcgtaggtagaagtagaggttaaggagggtgatggtggctatgatggtggggatgatg

SEQ ID NO: 70089 - DNA, 120 bp, Homo sapiens; identical to SEQ ID NO: 54439
  misc_feature: 760 for SV(C|O) and mtDNA

SEQ ID NO: 70090 - DNA, 120 bp, Homo sapiens
  misc_feature: 760 for SV(C|O) and mtDNA
ataattaaactttacttcctctctttcttcttcccactcatcctaaccctactcctaatcacataacctattcccccgagcaatctcaattacaatatatacaccaacaaacaatgttca

SEQ ID NO: 70091 - DNA, 120 bp, Homo sapiens; identical to SEQ ID NO: 52331
  misc_feature: 760 for SV(C|O) and mtDNA

SEQ ID NO: 70092 - DNA, 120 bp, Homo sapiens
  misc_feature: 760 for SV(C|O) and mtDNA
tcttcgaatttgcaattcaatatgaaaatcacctcggagctggtaaaaagaggcctaacccctgtctttagatttacagtccaatgcttcactcagccattttacctcacccccactgat

SEQ ID NO: 70093 - DNA, 120 bp, Homo sapiens
  misc_feature: 760 for SV(C|O) and mtDNA
gggattattgctaggatgaggatggatagtaatagggcaaggacgcctcctagtttgttagggacggatcggagaattgtgtaggcgaataggaaatatcattcgggcttgatgtgggga

SEQ ID NO: 70094 - DNA, 120 bp, Homo sapiens
  misc_feature: 760 for SV(C|O) and mtDNA
aacagcagtaatattaataattttcatgatttgagaagccttcgcttcgaagcgaaaagtcctaatagtagaagaaccctccataaacctggagtgactatatggatgccccccacccta

SEQ ID NO: 70095 - DNA, 120 bp, Homo sapiens
  misc_feature: 760 for SV(C|O) and mtDNA
tagggagattagtatagagaggtagagtttttttcgtgatagtggttcactggataagtggcgttggcttgccatgattgtgaggggtaggagtcaggtagttagtattaggaggggggt

SEQ ID NO: 70096 - DNA, 120 bp, Homo sapiens
  misc_feature: 760 for SV(C|O) and mtDNA
ctgcggcaagtactattgacccagcgatgggggcttcgacatgggctttagggagtcataagtggagtccgtaaagaggtatctttactataaaagctattgtgtaagctagtcatatta

SEQ ID NO: 70097 - DNA, 120 bp, Homo sapiens
  misc_feature: 760 for SV(C|O) and mtDNA
gggaaggcgctttgtgaagtaggccttatttctcttgtcctttcgtacagggaggaatttgaagtagatagaaaccgacctggattactccggtctgaactcagatcacgtaggacttta

SEQ ID NO: 70098 - DNA, 120 bp, Homo sapiens
  misc_feature: 760 for SV(C|O) and mtDNA
taaaagagttactttgatagagtaaataataggagcttaaacccccttatttctaggactatgagaatcgaacccatccctgagaatccaaaattctccgtgccacctatcacaccccat

SEQ ID NO: 70099 - DNA, 120 bp, Homo sapiens
  misc_feature: 760 for SV(C|O) and mtDNA
agtctcccttcaccatttccgacggcatctacggctcaacattttttgtagccacaggcttccacggacttcacgtcattattggctcaactttcctcactatctgcttcatccgccaac

SEQ ID NO: 70100 - DNA, 120 bp, Homo sapiens
  misc_feature: 760 for SV(C|O) and mtDNA
gtatttatggtaccgtacaatattcatggtggctggcagtaatgtacgaattacatagcggttgttgatgggtgagtcaatacttgggtggcacccaaatctgcttccccatgaaagaac

SEQ ID NO: 70101 - DNA, 120 bp, Homo sapiens
  misc_feature: 760 for SV(C|O) and mtDNA
gttacatggtccatcatagaattctcactgtgatatataaactcagacccaaacattaatcagttcttcaaatatctactcatcttcctaattaccatactaatcttagttaccgctaac

SEQ ID NO: 70102 - DNA, 120 bp, Homo sapiens; identical to SEQ ID NO: 54370
  misc_feature: 760 for SV(C|O) and mtDNA

SEQ ID NO: 70103 - DNA, 120 bp, Homo sapiens; identical to SEQ ID NO: 52172
  misc_feature: 760 for SV(C|O) and mtDNA

SEQ ID NO: 70104 - DNA, 120 bp, Homo sapiens; identical to SEQ ID NO: 52761
  misc_feature: 760 for SV(C|O) and mtDNA

SEQ ID NO: 70105 - DNA, 120 bp, Homo sapiens
  misc_feature: 760 for SV(C|O) and mtDNA
ggattattgctaggatgaggatggatagtaatagggcaaggacgcctcctagtttgttagggacggatcggagaattgtgtaggcgaataggaaatatcattcgggcttgatgtggggag

SEQ ID NO: 70106 - DNA, 120 bp, Homo sapiens; identical to SEQ ID NO: 60735
  misc_feature: 760 for SV(C|O) and mtDNA

SEQ ID NO: 70107 - DNA, 120 bp, Homo sapiens
  misc_feature: 760 for SV(C|O) and mtDNA
ggagaaggcttagaagaaaaccccacaaaccccattactaaacccacactcaacagaaacaaagcatacatcattattctcgcacggactacaaccacgaccaatgatatgaaaaaccat

SEQ ID NO: 70108 - DNA, 120 bp, Homo sapiens
  misc_feature: 760 for SV(C|O) and mtDNA
gatgtttcatgtggtgtatgcatcggggtagtccgagtaacgtcggggcattccggataggccgagaaagtgttgtgggaagaaagttagatttacgccgatgaatatgatagtgaaatg

SEQ ID NO: 70109 - DNA, 120 bp, Homo sapiens
  misc_feature: 760 for SV(C|O) and mtDNA
aaaaacttcctaccactcaccctagcattacttatatgatatgtctccatacccattacaatctccagcattccccctcaaacctaagaaatatgtctgataaaagagttactttgatag

SEQ ID NO: 70110 - DNA, 120 bp, Homo sapiens
  misc_feature: 760 for SV(C|O) and mtDNA
atggtggagttaaagactttttctctgatttgtccttggaaaaaggttttcatctccggtttacaagactggtgtattagtttatactacaaggacaggcccatttgagtattttgtttt

SEQ ID NO: 70111 - DNA, 120 bp, Homo sapiens
  misc_feature: 760 for SV(C|O) and mtDNA
acgttgttagatatggggagtagtgtgattgaggtggagtagattaggcgtaggtagaagtagaggttaaggagggtgatggtggctatgatggtggggatgatgaggctattgtttttt

SEQ ID NO: 70112 - DNA, 120 bp, Homo sapiens
  misc_feature: 760 for SV(C|O) and mtDNA
aagcagtgcttgaattatttggtttcggttgttttctattagactatggtgagctcaggtgattgatactcctgatgcgagtaatacggatgtgtttaggagtgggacttctaggggatt

SEQ ID NO: 70113 - DNA, 120 bp, Homo sapiens
  misc_feature: 759 for SV(C|O) and mtDNA
tagggtaacttgttccgttggtcaagttattggatcaattgagtatagtagttcgctttgactggtgaagtcttagcatgtactgctcggaggttgggttctgctccgaggtcgccccaa

SEQ ID NO: 70114 - DNA, 120 bp, Homo sapiens; identical to SEQ ID NO: 52565
  misc_feature: 759 for SV(C|O) and mtDNA

SEQ ID NO: 70115 - DNA, 120 bp, Homo sapiens; identical to SEQ ID NO: 53367
  misc_feature: 759 for SV(C|O) and mtDNA

SEQ ID NO: 70116 - DNA, 120 bp, Homo sapiens; identical to SEQ ID NO: 53584
  misc_feature: 759 for SV(C|O) and mtDNA

SEQ ID NO: 70117 - DNA, 120 bp, Homo sapiens
  misc_feature: 759 for SV(C|O) and mtDNA
aaatttaacacccatagtaggcctaaaagcagccaccaattaagaaagcgttcaagctcaacacccactacctaaaaaatcccaaacatataactgaactcctcacacccaattggacca

SEQ ID NO: 70118 - DNA, 120 bp, Homo sapiens
  misc_feature: 759 for SV(C|O) and mtDNA
ctagggtaacttgttccgttggtcaagttattggatcaattgagtatagtagttcgctttgactggtgaagtcttagcatgtactgctcggaggttgggttctgctccgaggtcgcccca

SEQ ID NO: 70119 - DNA, 120 bp, Homo sapiens; identical to SEQ ID NO: 52569
  misc_feature: 759 for SV(C|O) and mtDNA

SEQ ID NO: 70120 - DNA, 120 bp, Homo sapiens
  misc_feature: 759 for SV(C|O) and mtDNA
ggaagtatgtgcctgcgttcaggcgttctggctggttgcctcatcgggtgatgatagccaaggtggggataagtgtggtttcgaagaagatataaaatatgattagttctgtggctgtga

SEQ ID NO: 70121 - DNA, 120 bp, Homo sapiens
  misc_feature: 759 for SV(C|O) and mtDNA
ggaggatggggattattgctaggatgaggatggatagtaatagggcaaggacgcctcctagtttgttagggacggatcggagaattgtgtaggcgaataggaaatatcattcgggcttga

SEQ ID NO: 70122 - DNA, 120 bp, Homo sapiens; identical to SEQ ID NO: 51721
  misc_feature: 759 for SV(C|O) and mtDNA

SEQ ID NO: 70123 - DNA, 120 bp, Homo sapiens
  misc_feature: 759 for SV(C|O) and mtDNA
tattcgttacatggtccatcatagaattctcactgtgatatataaactcagacccaaacattaatcagttcttcaaatatctactcatcttcctaattaccatactaatcttagttaccg

SEQ ID NO: 70124 - DNA, 120 bp, Homo sapiens; identical to SEQ ID NO: 58108
  misc_feature: 759 for SV(C|O) and mtDNA

SEQ ID NO: 70125 - DNA, 120 bp, Homo sapiens
  misc_feature: 759 for SV(C|O) and mtDNA
tatcagacatatttcttaggtttgagggggaatgctggagattgtaatgggtatggagacatatcatataagtaatgctagggtgagtggtaggaagttttttcataggaggtgtatgag

SEQ ID NO: 70126 - DNA, 120 bp, Homo sapiens
  misc_feature: 759 for SV(C|O) and mtDNA
caaaccccattactaaacccacactcaacagaaacaaagcatacatcattattctcgcacggactacaaccacgaccaatgatatgaaaaaccatcgttgtatttcaactacaagaacac

SEQ ID NO: 70127 - DNA, 120 bp, Homo sapiens
  misc_feature: 759 for SV(C|O) and mtDNA
aaccactcattcatcgacctccccaccccatccaacatctccgcatgatgaaacttcggctcactccttggcgcctgcctgatcctccaaatcaccacaggactattcctagccatgcac

SEQ ID NO: 70128 - DNA, 120 bp, Homo sapiens
  misc_feature: 759 for SV(C|O) and mtDNA
cattcatcgacctccccaccccatccaacatctccgcatgatgaaacttcggctcactccttggcgcctgcctgatcctccaaatcaccacaggactattcctagccatgcactactcac

SEQ ID NO: 70129 - DNA, 120 bp, Homo sapiens; identical to SEQ ID NO: 54623
  misc_feature: 759 for SV(C|O) and mtDNA

SEQ ID NO: 70130 - DNA, 120 bp, Homo sapiens
  misc_feature: 759 for SV(C|O) and mtDNA
aaaatttaacacccatagtaggcctaaaagcagccaccaattaagaaagcgttcaagctcaacacccactacctaaaaaatcccaaacatataactgaactcctcacacccaattggacc

SEQ ID NO: 70131 - DNA, 120 bp, Homo sapiens
  misc_feature: 759 for SV(C|O) and mtDNA
ccaaacattaatcagttcttcaaatatctactcatcttcctaattaccatactaatcttagttaccgctaacaacctattccaactgttcatcggctgagagggcgtaggaattatatcc

SEQ ID NO: 70132 - DNA, 120 bp, Homo sapiens
  misc_feature: 759 for SV(C|O) and mtDNA
atctcacttctaggaatactagtataccgctcacacctcatatcctccctactatgcctagaaggaataatactatcactgttcattatagctactctcataaccctcaacacccactcc

SEQ ID NO: 70133 - DNA, 120 bp, Homo sapiens
  misc_feature: 759 for SV(C|O) and mtDNA
gctaaccccactaaaacactcaccaagacctcaacccctgacccccatgcctcaggatactcctcaatagccatcgctgtagtatatccaaagacaaccatcattccccctaaataaatt

SEQ ID NO: 70134 - DNA, 120 bp, Homo sapiens; identical to SEQ ID NO: 56947
  misc_feature: 759 for SV(C|O) and mtDNA

SEQ ID NO: 70135 - DNA, 120 bp, Homo sapiens; identical to SEQ ID NO: 52590
  misc_feature: 759 for SV(C|O) and mtDNA

SEQ ID NO: 70136 - DNA, 120 bp, Homo sapiens; identical to SEQ ID NO: 57522
  misc_feature: 759 for SV(C|O) and mtDNA

SEQ ID NO: 70137 - DNA, 120 bp, Homo sapiens
  misc_feature: 759 for SV(C|O) and mtDNA
gattattgctaggatgaggatggatagtaatagggcaaggacgcctcctagtttgttagggacggatcggagaattgtgtaggcgaataggaaatatcattcgggcttgatgtggggagg

SEQ ID NO: 70138 - DNA, 120 bp, Homo sapiens
  misc_feature: 759 for SV(C|O) and mtDNA
gattatcccgtatcgaaggcctttttggacaggtggtgtgtggtggccttggtatgtgctttctcgtgttacatcgcgccatcattggtatatggttagtgtgttggttagtaggcctag

SEQ ID NO: 70139 - DNA, 120 bp, Homo sapiens
  misc_feature: 759 for SV(C|O) and mtDNA
gatggttgtctttggatatactacagcgatggctattgaggagtatcctgaggcatgggggtcaggggttgaggtcttggtgagtgttttagtggggttagcgatggaggtaggattggt

SEQ ID NO: 70140 - DNA, 120 bp, Homo sapiens
  misc_feature: 759 for SV(C|O) and mtDNA
aaaagagttactttgatagagtaaataataggagcttaaacccccttatttctaggactatgagaatcgaacccatccctgagaatccaaaattctccgtgccacctatcacaccccatc

SEQ ID NO: 70141 - DNA, 120 bp, Homo sapiens
  misc_feature: 759 for SV(C|O) and mtDNA
cccaaacattaatcagttcttcaaatatctactcatcttcctaattaccatactaatcttagttaccgctaacaacctattccaactgttcatcggctgagagggcgtaggaattatatc

SEQ ID NO: 70142 - DNA, 120 bp, Homo sapiens
  misc_feature: 759 for SV(C|O) and mtDNA
atcagtctcttccccacaacaatattcatgtgcctagaccaagaagttattatctcgaactgacactgagccacaacccaaacaacccagctctccctaagcttcaaactagactacttc

SEQ ID NO: 70143 - DNA, 120 bp, Homo sapiens
  misc_feature: 759 for SV(C|O) and mtDNA
cttctcgtcttgctgtgtcatgcccgcctcttcacgggcaggtcaatttcactggttaaaagtaagagacagctgaaccctcgtggagccattcatacaggtccctatttaaggaacaag

SEQ ID NO: 70144 - DNA, 120 bp, Homo sapiens
  misc_feature: 759 for SV(C|O) and mtDNA
cttcttattatttgatctagaaattgccctccttttacccctaccatgagccctacaaacaactaacctaccactaatagttatgtcatccctcttattaatcatcatcctagccctaag

SEQ ID NO: 70145 - DNA, 120 bp, Homo sapiens
  misc_feature: 759 for SV(C|O) and mtDNA
cgtactacacgacacgtactacgttgtagctcacttccactatgtcctatcaataggagctgtatttgccatcataggaggcttcattcactgatttcccctattctcaggctacaccct

SEQ ID NO: 70146 - DNA, 120 bp, Homo sapiens
  misc_feature: 759 for SV(C|O) and mtDNA
cgggcgtatcatcaactgatgagcaagaaggatataattcctacgccctctcagccgatgaacagttggaataggttgttagcggtaactaagattagtatggtaattaggaagatgagt

SEQ ID NO: 70147 - DNA, 120 bp, Homo sapiens
  misc_feature: 759 for SV(C|O) and mtDNA
cgcacggactacaaccacgaccaatgatatgaaaaaccatcgttgtatttcaactacaagaacaccaatgaccccaatacgcaaaattaaccccctaataaaattaattaaccactcatt

SEQ ID NO: 70148 - DNA, 120 bp, Homo sapiens; identical to SEQ ID NO: 52763
  misc_feature: 759 for SV(C|O) and mtDNA

SEQ ID NO: 70149 - DNA, 120 bp, Homo sapiens
  misc_feature: 759 for SV(C|O) and mtDNA
ccccacaacaatattcatgtgcctagaccaagaagttattatctcgaactgacactgagccacaacccaaacaacccagctctccctaagcttcaaactagactacttctccataatatt

SEQ ID NO: 70150 - DNA, 120 bp, Homo sapiens
  misc_feature: 759 for SV(C|O) and mtDNA
atggggattattgctaggatgaggatggatagtaatagggcaaggacgcctcctagtttgttagggacggatcggagaattgtgtaggcgaataggaaatatcattcgggcttgatgtgg

SEQ ID NO: 70151 - DNA, 120 bp, Homo sapiens
  misc_feature: 759 for SV(C|O) and mtDNA
catcaagtatttcctcacgcaagcaaccgcatccataatccttctaatagctatcctcttcaacaatatactctccggacaatgaaccataaccaatactaccaatcaatactcatcatt

SEQ ID NO: 70152 - DNA, 120 bp, Homo sapiens
  misc_feature: 759 for SV(C|O) and mtDNA
aggctcttggtctgtatttaacctaaatttctataagattattagtataaaaggggagataggtaggagtagcgtggtaagggcgatgagtgtggggaggaatggggtgggttttgtatg

SEQ ID NO: 70153 - DNA, 120 bp, Homo sapiens; identical to SEQ ID NO: 52188
  misc_feature: 759 for SV(C|O) and mtDNA

SEQ ID NO: 70154 - DNA, 120 bp, Homo sapiens
  misc_feature: 759 for SV(C|O) and mtDNA
caaaaccccctccccatgcttacaagcaagtacagcaatcaaccctcaactatcacacatcaactgcaactccaaagccacccctcacccactaggataccaacaaacctactcaccctt

SEQ ID NO: 70155 - DNA, 120 bp, Homo sapiens
  misc_feature: 759 for SV(C|O) and mtDNA
atcagacatatttcttaggtttgagggggaatgctggagattgtaatgggtatggagacatatcatataagtaatgctagggtgagtggtaggaagttttttcataggaggtgtatgagt

SEQ ID NO: 70156 - DNA, 120 bp, Homo sapiens; identical to SEQ ID NO: 52301
  misc_feature: 759 for SV(C|O) and mtDNA

SEQ ID NO: 70157 - DNA, 120 bp, Homo sapiens; identical to SEQ ID NO: 58519
  misc_feature: 758 for SV(C|O) and mtDNA

SEQ ID NO: 70158 - DNA, 120 bp, Homo sapiens; identical to SEQ ID NO: 53363
  misc_feature: 758 for SV(C|O) and mtDNA

SEQ ID NO: 70159 - DNA, 120 bp, Homo sapiens
  misc_feature: 758 for SV(C|O) and mtDNA
taattaaactttacttcctctctttcttcttcccactcatcctaaccctactcctaatcacataacctattcccccgagcaatctcaattacaatatatacaccaacaaacaatgttcaa

SEQ ID NO: 70160 - DNA, 120 bp, Homo sapiens
  misc_feature: 758 for SV(C|O) and mtDNA
gtggagttaaagactttttctctgatttgtccttggaaaaaggttttcatctccggtttacaagactggtgtattagtttatactacaaggacaggcccatttgagtattttgttttcaa

SEQ ID NO: 70161 - DNA, 120 bp, Homo sapiens; identical to SEQ ID NO: 59839
  misc_feature: 758 for SV(C|O) and mtDNA

SEQ ID NO: 70162 - DNA, 120 bp, Homo sapiens
  misc_feature: 758 for SV(C|O) and mtDNA
ttcggtaagcattaggaatgccattgcgattagaatgggtacaatgaggagtaggaggttggccatgggtatgttgttaagaagaggaattgaacctctgactgtaaagttttaagtttt

SEQ ID NO: 70163 - DNA, 120 bp, Homo sapiens
  misc_feature: 758 for SV(C|O) and mtDNA
cccaaacccactccaccttactaccagacaaccttagccaaaccatttacccaaataaagtataggcgatagaaattgaaacctggcgcaatagatatagtaccgcaagggaaagatgaa

SEQ ID NO: 70164 - DNA, 120 bp, Homo sapiens; identical to SEQ ID NO: 59573
  misc_feature: 758 for SV(C|O) and mtDNA

SEQ ID NO: 70165 - DNA, 120 bp, Homo sapiens
  misc_feature: 758 for SV(C|O) and mtDNA
gatttagcggggtgatgcctgttgggggccagtgccctcctaattggggggtaggggctaggctggagtggtaaaaggctcagaaaaatcctgcgaagaaaaaaacttctgaggtaataa

SEQ ID NO: 70166 - DNA, 120 bp, Homo sapiens; identical to SEQ ID NO: 58258
  misc_feature: 758 for SV(C|O) and mtDNA

SEQ ID NO: 70167 - DNA, 120 bp, Homo sapiens
  misc_feature: 758 for SV(C|O) and mtDNA
ttaaacaaaacgaatgatttcgactcattaaattatgataatcatatttaccaaatgcccctcatttacataaatattatactagcatttaccatctcacttctaggaatactagtatac

SEQ ID NO: 70168 - DNA, 120 bp, Homo sapiens
  misc_feature: 758 for SV(C|O) and mtDNA
caaagacattggaacactatacctattattcggcgcatgagctggagtcctaggcacagctctaagcctccttattcgagccgagctgggccagccaggcaaccttctaggtaacgacca

SEQ ID NO: 70169 - DNA, 120 bp, Homo sapiens; identical to SEQ ID NO: 56895
  misc_feature: 758 for SV(C|O) and mtDNA

SEQ ID NO: 70170 - DNA, 120 bp, Homo sapiens
  misc_feature: 758 for SV(C|O) and mtDNA
tgctcgggcgtatcatcaactgatgagcaagaaggatataattcctacgccctctcagccgatgaacagttggaataggttgttagcggtaactaagattagtatggtaattaggaagat

SEQ ID NO: 70171 - DNA, 120 bp, Homo sapiens; identical to SEQ ID NO: 52937
  misc_feature: 758 for SV(C|O) and mtDNA

SEQ ID NO: 70172 - DNA, 120 bp, Homo sapiens
  misc_feature: 758 for SV(C|O) and mtDNA
catcgacctccccaccccatccaacatctccgcatgatgaaacttcggctcactccttggcgcctgcctgatcctccaaatcaccacaggactattcctagccatgcactactcaccaga

SEQ ID NO: 70173 - DNA, 120 bp, Homo sapiens
  misc_feature: 758 for SV(C|O) and mtDNA
tctcacttctaggaatactagtataccgctcacacctcatatcctccctactatgcctagaaggaataatactatcactgttcattatagctactctcataaccctcaacacccactccc

SEQ ID NO: 70174 - DNA, 120 bp, Homo sapiens
  misc_feature: 758 for SV(C|O) and mtDNA
aaaacttcctaccactcaccctagcattacttatatgatatgtctccatacccattacaatctccagcattccccctcaaacctaagaaatatgtctgataaaagagttactttgataga

SEQ ID NO: 70175 - DNA, 120 bp, Homo sapiens; identical to SEQ ID NO: 59578
  misc_feature: 758 for SV(C|O) and mtDNA

SEQ ID NO: 70176 - DNA, 120 bp, Homo sapiens
  misc_feature: 758 for SV(C|O) and mtDNA
tcgaagcgaaaagtcctaatagtagaagaaccctccataaacctggagtgactatatggatgccccccaccctaccacacattcgaagaacccgtatacataaaatctagacaaaaaagg

SEQ ID NO: 70177 - DNA, 120 bp, Homo sapiens; identical to SEQ ID NO: 58055
  misc_feature: 758 for SV(C|O) and mtDNA

SEQ ID NO: 70178 - DNA, 120 bp, Homo sapiens
  misc_feature: 758 for SV(C|O) and mtDNA
ctcgggcgtatcatcaactgatgagcaagaaggatataattcctacgccctctcagccgatgaacagttggaataggttgttagcggtaactaagattagtatggtaattaggaagatga

SEQ ID NO: 70179 - DNA, 120 bp, Homo sapiens
  misc_feature: 758 for SV(C|O) and mtDNA
tcagttcttcaaatatctactcatcttcctaattaccatactaatcttagttaccgctaacaacctattccaactgttcatcggctgagagggcgtaggaattatatccttcttgctcat

SEQ ID NO: 70180 - DNA, 120 bp, Homo sapiens
  misc_feature: 758 for SV(C|O) and mtDNA
tcagtctcttccccacaacaatattcatgtgcctagaccaagaagttattatctcgaactgacactgagccacaacccaaacaacccagctctccctaagcttcaaactagactacttct

SEQ ID NO: 70181 - DNA, 120 bp, Homo sapiens
  misc_feature: 758 for SV(C|O) and mtDNA
tcacagtgagaattctatgatggaccatgtaacgaataatgctacagggatgaatattatggagaagtagtctagtttgaagcttagggagagctgggttgtttgggttgtggctcagtg

SEQ ID NO: 70182 - DNA, 120 bp, Homo sapiens; identical to SEQ ID NO: 51930
  misc_feature: 758 for SV(C|O) and mtDNA

SEQ ID NO: 70183 - DNA, 120 bp, Homo sapiens
  misc_feature: 758 for SV(C|O) and mtDNA
acttcctaccactcaccctagcattacttatatgatatgtctccatacccattacaatctccagcattccccctcaaacctaagaaatatgtctgataaaagagttactttgatagagta

SEQ ID NO: 70184 - DNA, 120 bp, Homo sapiens; identical to SEQ ID NO: 58386
  misc_feature: 758 for SV(C|O) and mtDNA

SEQ ID NO: 70185 - DNA, 120 bp, Homo sapiens
  misc_feature: 758 for SV(C|O) and mtDNA
aaccccctccccatgcttacaagcaagtacagcaatcaaccctcaactatcacacatcaactgcaactccaaagccacccctcacccactaggataccaacaaacctactcacccttaac

SEQ ID NO: 70186 - DNA, 120 bp, Homo sapiens
  misc_feature: 758 for SV(C|O) and mtDNA
gtgtagaataggaagtatgtgcctgcgttcaggcgttctggctggttgcctcatcgggtgatgatagccaaggtggggataagtgtggtttcgaagaagatataaaatatgattagttct

SEQ ID NO: 70187 - DNA, 120 bp, Homo sapiens
  misc_feature: 758 for SV(C|O) and mtDNA
atcgacctccccaccccatccaacatctccgcatgatgaaacttcggctcactccttggcgcctgcctgatcctccaaatcaccacaggactattcctagccatgcactactcaccagac

SEQ ID NO: 70188 - DNA, 120 bp, Homo sapiens; identical to SEQ ID NO: 57337
  misc_feature: 758 for SV(C|O) and mtDNA

SEQ ID NO: 70189 - DNA, 120 bp, Homo sapiens
  misc_feature: 758 for SV(C|O) and mtDNA
ggatgatgctaataattaggctgtgggtggttgtgttgattcaaattatgtgttttttggaaagtcatgtcagtggtagtaatataattgttgggacgattagttttagcattggagtag

SEQ ID NO: 70190 - DNA, 120 bp, Homo sapiens
  misc_feature: 758 for SV(C|O) and mtDNA
cccacaacaatattcatgtgcctagaccaagaagttattatctcgaactgacactgagccacaacccaaacaacccagctctccctaagcttcaaactagactacttctccataatattc

SEQ ID NO: 70191 - DNA, 120 bp, Homo sapiens; identical to SEQ ID NO: 52425
  misc_feature: 758 for SV(C|O) and mtDNA

SEQ ID NO: 70192 - DNA, 120 bp, Homo sapiens
  misc_feature: 758 for SV(C|O) and mtDNA
ccgtgcgagaataatgatgtatgctttgtttctgttgagtgtgggtttagtaatggggtttgtggggttttcttctaagccttctcctatttatgggggtttagtattgattgttagcgg

SEQ ID NO: 70193 - DNA, 120 bp, Homo sapiens
  misc_feature: 758 for SV(C|O) and mtDNA
catatcattggtcgtggttgtagtccgtgcgagaataatgatgtatgctttgtttctgttgagtgtgggtttagtaatggggtttgtggggttttcttctaagccttctcctatttatgg

SEQ ID NO: 70194 - DNA, 120 bp, Homo sapiens
  misc_feature: 758 for SV(C|O) and mtDNA
atgaaaaaacttcctaccactcaccctagcattacttatatgatatgtctccatacccattacaatctccagcattccccctcaaacctaagaaatatgtctgataaaagagttactttg

SEQ ID NO: 70195 - DNA, 120 bp, Homo sapiens
  misc_feature: 758 for SV(C|O) and mtDNA
atatatcacagtgagaattctatgatggaccatgtaacgaataatgctacagggatgaatattatggagaagtagtctagtttgaagcttagggagagctgggttgtttgggttgtggct

SEQ ID NO: 70196 - DNA, 120 bp, Homo sapiens
  misc_feature: 758 for SV(C|O) and mtDNA
acccaaacattaatcagttcttcaaatatctactcatcttcctaattaccatactaatcttagttaccgctaacaacctattccaactgttcatcggctgagagggcgtaggaattatat

SEQ ID NO: 70197 - DNA, 120 bp, Homo sapiens; identical to SEQ ID NO: 51691
  misc_feature: 757 for SV(C|O) and mtDNA

SEQ ID NO: 70198 - DNA, 120 bp, Homo sapiens
  misc_feature: 757 for SV(C|O) and mtDNA
tagaatttttcgttcggtaagcattaggaatgccattgcgattagaatgggtacaatgaggagtaggaggttggccatgggtatgttgttaagaagaggaattgaacctctgactgtaaa

SEQ ID NO: 70199 - DNA, 120 bp, Homo sapiens; identical to SEQ ID NO: 53410
  misc_feature: 757 for SV(C|O) and mtDNA

SEQ ID NO: 70200 - DNA, 120 bp, Homo sapiens; identical to SEQ ID NO: 53799
  misc_feature: 757 for SV(C|O) and mtDNA

SEQ ID NO: 70201 - DNA, 120 bp, Homo sapiens
  misc_feature: 757 for SV(C|O) and mtDNA
atctgctcgggcgtatcatcaactgatgagcaagaaggatataattcctacgccctctcagccgatgaacagttggaataggttgttagcggtaactaagattagtatggtaattaggaa

SEQ ID NO: 70202 - DNA, 120 bp, Homo sapiens
  misc_feature: 757 for SV(C|O) and mtDNA
ttcatccctgtagcattattcgttacatggtccatcatagaattctcactgtgatatataaactcagacccaaacattaatcagttcttcaaatatctactcatcttcctaattaccata

SEQ ID NO: 70203 - DNA, 120 bp, Homo sapiens; identical to SEQ ID NO: 59228
  misc_feature: 757 for SV(C|O) and mtDNA

SEQ ID NO: 70204 - DNA, 120 bp, Homo sapiens
  misc_feature: 757 for SV(C|O) and mtDNA
ttatcagtctcttccccacaacaatattcatgtgcctagaccaagaagttattatctcgaactgacactgagccacaacccaaacaacccagctctccctaagcttcaaactagactact

SEQ ID NO: 70205 - DNA, 120 bp, Homo sapiens
  misc_feature: 757 for SV(C|O) and mtDNA
aaaccccctccccatgcttacaagcaagtacagcaatcaaccctcaactatcacacatcaactgcaactccaaagccacccctcacccactaggataccaacaaacctactcacccttaa

SEQ ID NO: 70206 - DNA, 120 bp, Homo sapiens
  misc_feature: 757 for SV(C|O) and mtDNA
tgtctttggatatactacagcgatggctattgaggagtatcctgaggcatgggggtcaggggttgaggtcttggtgagtgttttagtggggttagcgatggaggtaggattggtgctgtg

SEQ ID NO: 70207 - DNA, 120 bp, Homo sapiens; identical to SEQ ID NO: 55697
  misc_feature: 757 for SV(C|O) and mtDNA

SEQ ID NO: 70208 - DNA, 120 bp, Homo sapiens
  misc_feature: 757 for SV(C|O) and mtDNA
tgggcgttgattagtagtagttactggttgaacattgtttgttggtgtatatattgtaattgagattgctcgggggaataggttatgtgattaggagtagggttaggatgagtgggaaga

SEQ ID NO: 70209 - DNA, 120 bp, Homo sapiens
  misc_feature: 757 for SV(C|O) and mtDNA
tgaaaaaacttcctaccactcaccctagcattacttatatgatatgtctccatacccattacaatctccagcattccccctcaaacctaagaaatatgtctgataaaagagttactttga

SEQ ID NO: 70210 - DNA, 120 bp, Homo sapiens
  misc_feature: 757 for SV(C|O) and mtDNA
tctgctcgggcgtatcatcaactgatgagcaagaaggatataattcctacgccctctcagccgatgaacagttggaataggttgttagcggtaactaagattagtatggtaattaggaag

SEQ ID NO: 70211 - DNA, 120 bp, Homo sapiens
  misc_feature: 757 for SV(C|O) and mtDNA
tcacttctaggaatactagtataccgctcacacctcatatcctccctactatgcctagaaggaataatactatcactgttcattatagctactctcataaccctcaacacccactccctc

SEQ ID NO: 70212 - DNA, 120 bp, Homo sapiens; identical to SEQ ID NO: 59581
  misc_feature: 757 for SV(C|O) and mtDNA

SEQ ID NO: 70213 - DNA, 120 bp, Homo sapiens; identical to SEQ ID NO: 51966
  misc_feature: 757 for SV(C|O) and mtDNA

SEQ ID NO: 70214 - DNA, 120 bp, Homo sapiens
  misc_feature: 757 for SV(C|O) and mtDNA
tagcctagaatttttcgttcggtaagcattaggaatgccattgcgattagaatgggtacaatgaggagtaggaggttggccatgggtatgttgttaagaagaggaattgaacctctgact

SEQ ID NO: 70215 - DNA, 120 bp, Homo sapiens; identical to SEQ ID NO: 54228
  misc_feature: 757 for SV(C|O) and mtDNA

SEQ ID NO: 70216 - DNA, 120 bp, Homo sapiens
  misc_feature: 757 for SV(C|O) and mtDNA
taattttaataatcaacaccctcctagccttactactaataattattacattttgactaccacaactcaacggctacatagaaaaatccaccccttacgagtgcggcttcgaccctatat

SEQ ID NO: 70217 - DNA, 120 bp, Homo sapiens
  misc_feature: 757 for SV(C|O) and mtDNA
cagacccaaacattaatcagttcttcaaatatctactcatcttcctaattaccatactaatcttagttaccgctaacaacctattccaactgttcatcggctgagagggcgtaggaatta

SEQ ID NO: 70218 - DNA, 120 bp, Homo sapiens; identical to SEQ ID NO: 53547
  misc_feature: 757 for SV(C|O) and mtDNA

SEQ ID NO: 70219 - DNA, 120 bp, Homo sapiens; identical to SEQ ID NO: 53418
  misc_feature: 757 for SV(C|O) and mtDNA

SEQ ID NO: 70220 - DNA, 120 bp, Homo sapiens
  misc_feature: 757 for SV(C|O) and mtDNA
taacctaaatttctataagattattagtataaaaggggagataggtaggagtagcgtggtaagggcgatgagtgtggggaggaatggggtgggttttgtatgttcaaactgtcattttat

SEQ ID NO: 70221 - DNA, 120 bp, Homo sapiens
  misc_feature: 757 for SV(C|O) and mtDNA
gttgttagatatggggagtagtgtgattgaggtggagtagattaggcgtaggtagaagtagaggttaaggagggtgatggtggctatgatggtggggatgatgaggctattgttttttgt

SEQ ID NO: 70222 - DNA, 120 bp, Homo sapiens
  misc_feature: 757 for SV(C|O) and mtDNA
gttgtctttggatatactacagcgatggctattgaggagtatcctgaggcatgggggtcaggggttgaggtcttggtgagtgttttagtggggttagcgatggaggtaggattggtgctg

SEQ ID NO: 70223 - DNA, 120 bp, Homo sapiens
  misc_feature: 757 for SV(C|O) and mtDNA
ctacacgacacgtactacgttgtagctcacttccactatgtcctatcaataggagctgtatttgccatcataggaggcttcattcactgatttcccctattctcaggctacaccctagac

SEQ ID NO: 70224 - DNA, 120 bp, Homo sapiens
  misc_feature: 757 for SV(C|O) and mtDNA
atagcctagaatttttcgttcggtaagcattaggaatgccattgcgattagaatgggtacaatgaggagtaggaggttggccatgggtatgttgttaagaagaggaattgaacctctgac

SEQ ID NO: 70225 - DNA, 120 bp, Homo sapiens
  misc_feature: 757 for SV(C|O) and mtDNA
gtatcgaaggcctttttggacaggtggtgtgtggtggccttggtatgtgctttctcgtgttacatcgcgccatcattggtatatggttagtgtgttggttagtaggcctagtatgaggag

SEQ ID NO: 70226 - DNA, 120 bp, Homo sapiens
  misc_feature: 757 for SV(C|O) and mtDNA
gtagggagattagtatagagaggtagagtttttttcgtgatagtggttcactggataagtggcgttggcttgccatgattgtgaggggtaggagtcaggtagttagtattaggagggggg

SEQ ID NO: 70227 - DNA, 120 bp, Homo sapiens
  misc_feature: 757 for SV(C|O) and mtDNA
ggggaaggcgctttgtgaagtaggccttatttctcttgtcctttcgtacagggaggaatttgaagtagatagaaaccgacctggattactccggtctgaactcagatcacgtaggacttt

SEQ ID NO: 70228 - DNA, 120 bp, Homo sapiens
  misc_feature: 757 for SV(C|O) and mtDNA
ggcgtatcatcaactgatgagcaagaaggatataattcctacgccctctcagccgatgaacagttggaataggttgttagcggtaactaagattagtatggtaattaggaagatgagtag

SEQ ID NO: 70229 - DNA, 120 bp, Homo sapiens
  misc_feature: 757 for SV(C|O) and mtDNA
aatgccccgacgttactcggactaccccgatgcatacaccacatgaaacatcctatcatctgtaggctcattcatttctctaacagcagtaatattaataattttcatgatttgagaagc

SEQ ID NO: 70230 - DNA, 120 bp, Homo sapiens
  misc_feature: 757 for SV(C|O) and mtDNA
aacatacaaaacccaccccattcctccccacactcatcgcccttaccacgctactcctacctatctccccttttatactaataatcttatagaaatttaggttaaatacagaccaagagc

SEQ ID NO: 70231 - DNA, 120 bp, Homo sapiens
  misc_feature: 757 for SV(C|O) and mtDNA
cctgtagcattattcgttacatggtccatcatagaattctcactgtgatatataaactcagacccaaacattaatcagttcttcaaatatctactcatcttcctaattaccatactaatc

SEQ ID NO: 70232 - DNA, 120 bp, Homo sapiens
  misc_feature: 757 for SV(C|O) and mtDNA
catctcacttctaggaatactagtataccgctcacacctcatatcctccctactatgcctagaaggaataatactatcactgttcattatagctactctcataaccctcaacacccactc

SEQ ID NO: 70233 - DNA, 120 bp, Homo sapiens
  misc_feature: 757 for SV(C|O) and mtDNA
gaacatacaaaacccaccccattcctccccacactcatcgcccttaccacgctactcctacctatctccccttttatactaataatcttatagaaatttaggttaaatacagaccaagag

SEQ ID NO: 70234 - DNA, 120 bp, Homo sapiens
  misc_feature: 757 for SV(C|O) and mtDNA
gaaaaaacttcctaccactcaccctagcattacttatatgatatgtctccatacccattacaatctccagcattccccctcaaacctaagaaatatgtctgataaaagagttactttgat

SEQ ID NO: 70235 - DNA, 120 bp, Homo sapiens; identical to SEQ ID NO: 53509
  misc_feature: 757 for SV(C|O) and mtDNA

SEQ ID NO: 70236 - DNA, 120 bp, Homo sapiens; identical to SEQ ID NO: 57389
  misc_feature: 757 for SV(C|O) and mtDNA

SEQ ID NO: 70237 - DNA, 120 bp, Homo sapiens
  misc_feature: 757 for SV(C|O) and mtDNA
agaaggcttagaagaaaaccccacaaaccccattactaaacccacactcaacagaaacaaagcatacatcattattctcgcacggactacaaccacgaccaatgatatgaaaaaccatcg

SEQ ID NO: 70238 - DNA, 120 bp, Homo sapiens
  misc_feature: 757 for SV(C|O) and mtDNA
ccgaccacaccgctaacaatcaatactaaacccccataaataggagaaggcttagaagaaaaccccacaaaccccattactaaacccacactcaacagaaacaaagcatacatcattatt

SEQ ID NO: 70239 - DNA, 120 bp, Homo sapiens; identical to SEQ ID NO: 52414
  misc_feature: 757 for SV(C|O) and mtDNA

SEQ ID NO: 70240 - DNA, 120 bp, Homo sapiens
  misc_feature: 757 for SV(C|O) and mtDNA
cacctttattatcagtctcttccccacaacaatattcatgtgcctagaccaagaagttattatctcgaactgacactgagccacaacccaaacaacccagctctccctaagcttcaaact

SEQ ID NO: 70241 - DNA, 120 bp, Homo sapiens
  misc_feature: 757 for SV(C|O) and mtDNA
aattaaccactcattcatcgacctccccaccccatccaacatctccgcatgatgaaacttcggctcactccttggcgcctgcctgatcctccaaatcaccacaggactattcctagccat

SEQ ID NO: 70242 - DNA, 120 bp, Homo sapiens; identical to SEQ ID NO: 52864
  misc_feature: 757 for SV(C|O) and mtDNA

SEQ ID NO: 70243 - DNA, 120 bp, Homo sapiens
  misc_feature: 757 for SV(C|O) and mtDNA
accactcattcatcgacctccccaccccatccaacatctccgcatgatgaaacttcggctcactccttggcgcctgcctgatcctccaaatcaccacaggactattcctagccatgcact

SEQ ID NO: 70244 - DNA, 120 bp, Homo sapiens
  misc_feature: 756 for SV(C|O) and mtDNA
tttttctgagccttttaccactccagcctagcccctaccccccaattaggagggcactggcccccaacaggcatcaccccgctaaatcccctagaagtcccactcctaaacacatccgta

SEQ ID NO: 70245 - DNA, 120 bp, Homo sapiens
  misc_feature: 756 for SV(C|O) and mtDNA
ttttacgttgttagatatggggagtagtgtgattgaggtggagtagattaggcgtaggtagaagtagaggttaaggagggtgatggtggctatgatggtggggatgatgaggctattgtt

SEQ ID NO: 70246 - DNA, 120 bp, Homo sapiens; identical to SEQ ID NO: 59006
  misc_feature: 756 for SV(C|O) and mtDNA

SEQ ID NO: 70247 - DNA, 120 bp, Homo sapiens
  misc_feature: 756 for SV(C|O) and mtDNA
tttgatagagtaaataataggagcttaaacccccttatttctaggactatgagaatcgaacccatccctgagaatccaaaattctccgtgccacctatcacaccccatcctaaagtaagg

SEQ ID NO: 70248 - DNA, 120 bp, Homo sapiens
  misc_feature: 756 for SV(C|O) and mtDNA
tttaatctgacgcaggcttatgcggaggagaatgttttcatgttacttatactaacattagttcttctatagggtgatagattggtccaattgggtgtgaggagttcagttatatgtttg

SEQ ID NO: 70249 - DNA, 120 bp, Homo sapiens
  misc_feature: 756 for SV(C|O) and mtDNA
aacttccaattaactagttttgacaacattcaaaaaagagtaataaacttcgccttaattttaataatcaacaccctcctagccttactactaataattattacattttgactaccacaa

SEQ ID NO: 70250 - DNA, 120 bp, Homo sapiens
  misc_feature: 756 for SV(C|O) and mtDNA
tacattactgccagccaccatgaatattgtacggtaccataaatacttgaccacctgtagtacataaaaacccaatccacatcaaaaccccctccccatgcttacaagcaagtacagcaa

SEQ ID NO: 70251 - DNA, 120 bp, Homo sapiens
  misc_feature: 756 for SV(C|O) and mtDNA
agtatttatggtaccgtacaatattcatggtggctggcagtaatgtacgaattacatagcggttgttgatgggtgagtcaatacttgggtggcacccaaatctgcttccccatgaaagaa

SEQ ID NO: 70252 - DNA, 120 bp, Homo sapiens
  misc_feature: 756 for SV(C|O) and mtDNA
ttctgagccttttaccactccagcctagcccctaccccccaattaggagggcactggcccccaacaggcatcaccccgctaaatcccctagaagtcccactcctaaacacatccgtatta

SEQ ID NO: 70253 - DNA, 120 bp, Homo sapiens
  misc_feature: 756 for SV(C|O) and mtDNA
ttctccataatattcatccctgtagcattattcgttacatggtccatcatagaattctcactgtgatatataaactcagacccaaacattaatcagttcttcaaatatctactcatcttc

SEQ ID NO: 70254 - DNA, 120 bp, Homo sapiens; identical to SEQ ID NO: 54516
  misc_feature: 756 for SV(C|O) and mtDNA

SEQ ID NO: 70255 - DNA, 120 bp, Homo sapiens
  misc_feature: 756 for SV(C|O) and mtDNA
ttattatcagtctcttccccacaacaatattcatgtgcctagaccaagaagttattatctcgaactgacactgagccacaacccaaacaacccagctctccctaagcttcaaactagact

SEQ ID NO: 70256 - DNA, 120 bp, Homo sapiens
  misc_feature: 756 for SV(C|O) and mtDNA
aactaaatactaccgtatggcccaccataattacccccatactccttacactattcctcatcacccaactaaaaatattaaacacaaactaccacctacctccctcaccaaagcccataa

SEQ ID NO: 70257 - DNA, 120 bp, Homo sapiens
  misc_feature: 756 for SV(C|O) and mtDNA
ttacatggtccatcatagaattctcactgtgatatataaactcagacccaaacattaatcagttcttcaaatatctactcatcttcctaattaccatactaatcttagttaccgctaaca

SEQ ID NO: 70258 - DNA, 120 bp, Homo sapiens; identical to SEQ ID NO: 52896
  misc_feature: 756 for SV(C|O) and mtDNA

SEQ ID NO: 70259 - DNA, 120 bp, Homo sapiens
  misc_feature: 756 for SV(C|O) and mtDNA
tgtacgaaaggacaagagaaataaggcctacttcacaaagcgccttcccccgtaaatgatatcatctcaacttagtattatacccacacccacccaagaacagggtttgttaagatggca

SEQ ID NO: 70260 - DNA, 120 bp, Homo sapiens
  misc_feature: 756 for SV(C|O) and mtDNA
tggttgtctttggatatactacagcgatggctattgaggagtatcctgaggcatgggggtcaggggttgaggtcttggtgagtgttttagtggggttagcgatggaggtaggattggtgc

SEQ ID NO: 70261 - DNA, 120 bp, Homo sapiens
  misc_feature: 756 for SV(C|O) and mtDNA
ccacaacaatattcatgtgcctagaccaagaagttattatctcgaactgacactgagccacaacccaaacaacccagctctccctaagcttcaaactagactacttctccataatattca

SEQ ID NO: 70262 - DNA, 120 bp, Homo sapiens
  misc_feature: 756 for SV(C|O) and mtDNA
tacgaaaggacaagagaaataaggcctacttcacaaagcgccttcccccgtaaatgatatcatctcaacttagtattatacccacacccacccaagaacagggtttgttaagatggcaga

SEQ ID NO: 70263 - DNA, 120 bp, Homo sapiens
  misc_feature: 756 for SV(C|O) and mtDNA
actacacgacacgtactacgttgtagctcacttccactatgtcctatcaataggagctgtatttgccatcataggaggcttcattcactgatttcccctattctcaggctacaccctaga

SEQ ID NO: 70264 - DNA, 120 bp, Homo sapiens
  misc_feature: 756 for SV(C|O) and mtDNA
gatcaaataataagaaggtaatagctactaagaagaattttatggagaaagggacgcgggcgggggatatagggtcgaagccgcactcgtaaggggtggatttttctatgtagccgttga

SEQ ID NO: 70265 - DNA, 120 bp, Homo sapiens
  misc_feature: 756 for SV(C|O) and mtDNA
aaaaaacttcctaccactcaccctagcattacttatatgatatgtctccatacccattacaatctccagcattccccctcaaacctaagaaatatgtctgataaaagagttactttgata

SEQ ID NO: 70266 - DNA, 120 bp, Homo sapiens
  misc_feature: 756 for SV(C|O) and mtDNA
gagttaaagactttttctctgatttgtccttggaaaaaggttttcatctccggtttacaagactggtgtattagtttatactacaaggacaggcccatttgagtattttgttttcaatta

SEQ ID NO: 70267 - DNA, 120 bp, Homo sapiens
  misc_feature: 756 for SV(C|O) and mtDNA
taatggtggagttaaagactttttctctgatttgtccttggaaaaaggttttcatctccggtttacaagactggtgtattagtttatactacaaggacaggcccatttgagtattttgtt

SEQ ID NO: 70268 - DNA, 120 bp, Homo sapiens; identical to SEQ ID NO: 55168
  misc_feature: 756 for SV(C|O) and mtDNA

SEQ ID NO: 70269 - DNA, 120 bp, Homo sapiens
  misc_feature: 756 for SV(C|O) and mtDNA
aaaaccccctccccatgcttacaagcaagtacagcaatcaaccctcaactatcacacatcaactgcaactccaaagccacccctcacccactaggataccaacaaacctactcaccctta

SEQ ID NO: 70270 - DNA, 120 bp, Homo sapiens
  misc_feature: 756 for SV(C|O) and mtDNA
ataggagaaggcttagaagaaaaccccacaaaccccattactaaacccacactcaacagaaacaaagcatacatcattattctcgcacggactacaaccacgaccaatgatatgaaaaac

SEQ ID NO: 70271 - DNA, 120 bp, Homo sapiens
  misc_feature: 756 for SV(C|O) and mtDNA
gtggtcaagtatttatggtaccgtacaatattcatggtggctggcagtaatgtacgaattacatagcggttgttgatgggtgagtcaatacttgggtggcacccaaatctgcttccccat

SEQ ID NO: 70272 - DNA, 120 bp, Homo sapiens
  misc_feature: 756 for SV(C|O) and mtDNA
ggtgtagaataggaagtatgtgcctgcgttcaggcgttctggctggttgcctcatcgggtgatgatagccaaggtggggataagtgtggtttcgaagaagatataaaatatgattagttc

SEQ ID NO: 70273 - DNA, 120 bp, Homo sapiens
  misc_feature: 756 for SV(C|O) and mtDNA
gggtgtagaataggaagtatgtgcctgcgttcaggcgttctggctggttgcctcatcgggtgatgatagccaaggtggggataagtgtggtttcgaagaagatataaaatatgattagtt

SEQ ID NO: 70274 - DNA, 120 bp, Homo sapiens; identical to SEQ ID NO: 55548
  misc_feature: 756 for SV(C|O) and mtDNA

SEQ ID NO: 70275 - DNA, 120 bp, Homo sapiens
  misc_feature: 756 for SV(C|O) and mtDNA
gctcgggcgtatcatcaactgatgagcaagaaggatataattcctacgccctctcagccgatgaacagttggaataggttgttagcggtaactaagattagtatggtaattaggaagatg

SEQ ID NO: 70276 - DNA, 120 bp, Homo sapiens; identical to SEQ ID NO: 53675
  misc_feature: 756 for SV(C|O) and mtDNA

SEQ ID NO: 70277 - DNA, 120 bp, Homo sapiens; identical to SEQ ID NO: 57944
  misc_feature: 756 for SV(C|O) and mtDNA

SEQ ID NO: 70278 - DNA, 120 bp, Homo sapiens
  misc_feature: 756 for SV(C|O) and mtDNA
accaatggatagctgttatcctttaaaagttgagaaagccatgttgttagacatgggggcatgagttagcagttcttgtgagctttctcggtaaataaggggtcgtaagcctctgttgtc

SEQ ID NO: 70279 - DNA, 120 bp, Homo sapiens
  misc_feature: 756 for SV(C|O) and mtDNA
cttccaattaactagttttgacaacattcaaaaaagagtaataaacttcgccttaattttaataatcaacaccctcctagccttactactaataattattacattttgactaccacaact

SEQ ID NO: 70280 - DNA, 120 bp, Homo sapiens
  misc_feature: 756 for SV(C|O) and mtDNA
cttatttaccgagaaagctcacaagaactgctaactcatgcccccatgtctaacaacatggctttctcaacttttaaaggataacagctatccattggtcttaggccccaaaaattttgg

SEQ ID NO: 70281 - DNA, 120 bp, Homo sapiens
  misc_feature: 756 for SV(C|O) and mtDNA
cattcgttttgtttaaactatataccaattcggttcagtctaatcctttttgtagtcactcataggccagacttagggctaggatgatgattaataagagggatgacataactattagtg

SEQ ID NO: 70282 - DNA, 120 bp, Homo sapiens
  misc_feature: 756 for SV(C|O) and mtDNA
cacaacaatattcatgtgcctagaccaagaagttattatctcgaactgacactgagccacaacccaaacaacccagctctccctaagcttcaaactagactacttctccataatattcat

SEQ ID NO: 70283 - DNA, 120 bp, Homo sapiens
  misc_feature: 756 for SV(C|O) and mtDNA
caagtatttcctcacgcaagcaaccgcatccataatccttctaatagctatcctcttcaacaatatactctccggacaatgaaccataaccaatactaccaatcaatactcatcattaat

SEQ ID NO: 70284 - DNA, 120 bp, Homo sapiens
  misc_feature: 756 for SV(C|O) and mtDNA
caaacattaatcagttcttcaaatatctactcatcttcctaattaccatactaatcttagttaccgctaacaacctattccaactgttcatcggctgagagggcgtaggaattatatcct

SEQ ID NO: 70285 - DNA, 120 bp, Homo sapiens
  misc_feature: 756 for SV(C|O) and mtDNA
attatcccgtatcgaaggcctttttggacaggtggtgtgtggtggccttggtatgtgctttctcgtgttacatcgcgccatcattggtatatggttagtgtgttggttagtaggcctagt

SEQ ID NO: 70286 - DNA, 120 bp, Homo sapiens; identical to SEQ ID NO: 60907
  misc_feature: 756 for SV(C|O) and mtDNA

SEQ ID NO: 70287 - DNA, 120 bp, Homo sapiens
  misc_feature: 756 for SV(C|O) and mtDNA
aaggctcttggtctgtatttaacctaaatttctataagattattagtataaaaggggagataggtaggagtagcgtggtaagggcgatgagtgtggggaggaatggggtgggttttgtat

SEQ ID NO: 70288 - DNA, 120 bp, Homo sapiens; identical to SEQ ID NO: 52879
  misc_feature: 755 for SV(C|O) and mtDNA

SEQ ID NO: 70289 - DNA, 120 bp, Homo sapiens
  misc_feature: 755 for SV(C|O) and mtDNA
ttatgactccctaaagcccatgtcgaagcccccatcgctgggtcaatagtacttgccgcagtactcttaaaactaggcggctatggtataatacgcctcacactcattctcaaccccctg

SEQ ID NO: 70290 - DNA, 120 bp, Homo sapiens
  misc_feature: 755 for SV(C|O) and mtDNA
ttatcccgtatcgaaggcctttttggacaggtggtgtgtggtggccttggtatgtgctttctcgtgttacatcgcgccatcattggtatatggttagtgtgttggttagtaggcctagta

SEQ ID NO: 70291 - DNA, 120 bp, Homo sapiens
  misc_feature: 755 for SV(C|O) and mtDNA
tgttgttagacatgggggcatgagttagcagttcttgtgagctttctcggtaaataaggggtcgtaagcctctgttgtcagattcacaatctgatgttttggttaaactatatttacaag

SEQ ID NO: 70292 - DNA, 120 bp, Homo sapiens
  misc_feature: 755 for SV(C|O) and mtDNA
taacttccaattaactagttttgacaacattcaaaaaagagtaataaacttcgccttaattttaataatcaacaccctcctagccttactactaataattattacattttgactaccaca

SEQ ID NO: 70293 - DNA, 120 bp, Homo sapiens
  misc_feature: 755 for SV(C|O) and mtDNA
agcagtaatattaataattttcatgatttgagaagccttcgcttcgaagcgaaaagtcctaatagtagaagaaccctccataaacctggagtgactatatggatgccccccaccctacca

SEQ ID NO: 70294 - DNA, 120 bp, Homo sapiens
  misc_feature: 755 for SV(C|O) and mtDNA
aggggtggctttggagttgcagttgatgtgtgatagttgagggttgattgctgtacttgcttgtaagcatggggagggggttttgatgtggattgggtttttatgtactacaggtggtca

SEQ ID NO: 70295 - DNA, 120 bp, Homo sapiens
  misc_feature: 755 for SV(C|O) and mtDNA
atgtcctatcaataggagctgtatttgccatcataggaggcttcattcactgatttcccctattctcaggctacaccctagaccaaacctacgccaaaatccatttcactatcatattca

SEQ ID NO: 70296 - DNA, 120 bp, Homo sapiens
  misc_feature: 755 for SV(C|O) and mtDNA
actaaaacccctacgcatttatatagaggagacaagtcgtaacatggtaagtgtactggaaagtgcacttggacgaaccagagtgtagcttaacacaaagcacccaacttacacttagga

SEQ ID NO: 70297 - DNA, 120 bp, Homo sapiens
  misc_feature: 755 for SV(C|O) and mtDNA
aaaaaatttaacacccatagtaggcctaaaagcagccaccaattaagaaagcgttcaagctcaacacccactacctaaaaaatcccaaacatataactgaactcctcacacccaattgga

SEQ ID NO: 70298 - DNA, 120 bp, Homo sapiens; identical to SEQ ID NO: 60895
  misc_feature: 755 for SV(C|O) and mtDNA

SEQ ID NO: 70299 - DNA, 120 bp, Homo sapiens; identical to SEQ ID NO: 55668
  misc_feature: 755 for SV(C|O) and mtDNA

SEQ ID NO: 70300 - DNA, 120 bp, Homo sapiens; identical to SEQ ID NO: 52975
  misc_feature: 755 for SV(C|O) and mtDNA

SEQ ID NO: 70301 - DNA, 120 bp, Homo sapiens
  misc_feature: 755 for SV(C|O) and mtDNA
tatcccgtatcgaaggcctttttggacaggtggtgtgtggtggccttggtatgtgctttctcgtgttacatcgcgccatcattggtatatggttagtgtgttggttagtaggcctagtat

SEQ ID NO: 70302 - DNA, 120 bp, Homo sapiens; identical to SEQ ID NO: 54526
  misc_feature: 755 for SV(C|O) and mtDNA

SEQ ID NO: 70303 - DNA, 120 bp, Homo sapiens; identical to SEQ ID NO: 54363
  misc_feature: 755 for SV(C|O) and mtDNA

SEQ ID NO: 70304 - DNA, 120 bp, Homo sapiens; identical to SEQ ID NO: 60216
  misc_feature: 755 for SV(C|O) and mtDNA

SEQ ID NO: 70305 - DNA, 120 bp, Homo sapiens
  misc_feature: 755 for SV(C|O) and mtDNA
taggagaaggcttagaagaaaaccccacaaaccccattactaaacccacactcaacagaaacaaagcatacatcattattctcgcacggactacaaccacgaccaatgatatgaaaaacc

SEQ ID NO: 70306 - DNA, 120 bp, Homo sapiens; identical to SEQ ID NO: 60484
  misc_feature: 755 for SV(C|O) and mtDNA

SEQ ID NO: 70307 - DNA, 120 bp, Homo sapiens
  misc_feature: 755 for SV(C|O) and mtDNA
aacgtaggtgcgataaataataggatgaggcaggaatcaaagacagatactgcgacatagggtgctccggctccagcgtctcgcaatgctatcgcgtgcacaccccccagacgaaaatac

SEQ ID NO: 70308 - DNA, 120 bp, Homo sapiens
  misc_feature: 755 for SV(C|O) and mtDNA
gtacttcgagtctcccttcaccatttccgacggcatctacggctcaacattttttgtagccacaggcttccacggacttcacgtcattattggctcaactttcctcactatctgcttcat

SEQ ID NO: 70309 - DNA, 120 bp, Homo sapiens
  misc_feature: 755 for SV(C|O) and mtDNA
atattcatccctgtagcattattcgttacatggtccatcatagaattctcactgtgatatataaactcagacccaaacattaatcagttcttcaaatatctactcatcttcctaattacc

SEQ ID NO: 70310 - DNA, 120 bp, Homo sapiens; identical to SEQ ID NO: 54293
  misc_feature: 755 for SV(C|O) and mtDNA

SEQ ID NO: 70311 - DNA, 120 bp, Homo sapiens
  misc_feature: 755 for SV(C|O) and mtDNA
attaattaaccactcattcatcgacctccccaccccatccaacatctccgcatgatgaaacttcggctcactccttggcgcctgcctgatcctccaaatcaccacaggactattcctagc

SEQ ID NO: 70312 - DNA, 120 bp, Homo sapiens
  misc_feature: 755 for SV(C|O) and mtDNA
gcctagaatttttcgttcggtaagcattaggaatgccattgcgattagaatgggtacaatgaggagtaggaggttggccatgggtatgttgttaagaagaggaattgaacctctgactgt

SEQ ID NO: 70313 - DNA, 120 bp, Homo sapiens
  misc_feature: 755 for SV(C|O) and mtDNA
atctatcaccctatagaagaactaatgttagtataagtaacatgaaaacattctcctccgcataagcctgcgtcagattaaaacactgaactgacaattaacagcccaatatctacaatc

SEQ ID NO: 70314 - DNA, 120 bp, Homo sapiens
  misc_feature: 755 for SV(C|O) and mtDNA
gatggggattattgctaggatgaggatggatagtaatagggcaaggacgcctcctagtttgttagggacggatcggagaattgtgtaggcgaataggaaatatcattcgggcttgatgtg

SEQ ID NO: 70315 - DNA, 120 bp, Homo sapiens; identical to SEQ ID NO: 52580
  misc_feature: 755 for SV(C|O) and mtDNA

SEQ ID NO: 70316 - DNA, 120 bp, Homo sapiens
  misc_feature: 755 for SV(C|O) and mtDNA
cgaccacaccgctaacaatcaatactaaacccccataaataggagaaggcttagaagaaaaccccacaaaccccattactaaacccacactcaacagaaacaaagcatacatcattattc

SEQ ID NO: 70317 - DNA, 120 bp, Homo sapiens
  misc_feature: 755 for SV(C|O) and mtDNA
agaagaaaaccccacaaaccccattactaaacccacactcaacagaaacaaagcatacatcattattctcgcacggactacaaccacgaccaatgatatgaaaaaccatcgttgtatttc

SEQ ID NO: 70318 - DNA, 120 bp, Homo sapiens
  misc_feature: 755 for SV(C|O) and mtDNA
ctcacttctaggaatactagtataccgctcacacctcatatcctccctactatgcctagaaggaataatactatcactgttcattatagctactctcataaccctcaacacccactccct

SEQ ID NO: 70319 - DNA, 120 bp, Homo sapiens; identical to SEQ ID NO: 57123
  misc_feature: 755 for SV(C|O) and mtDNA

SEQ ID NO: 70320 - DNA, 120 bp, Homo sapiens; identical to SEQ ID NO: 52336
  misc_feature: 755 for SV(C|O) and mtDNA

SEQ ID NO: 70321 - DNA, 120 bp, Homo sapiens
  misc_feature: 755 for SV(C|O) and mtDNA
ataatgaacagtgatagtattattccttctaggcatagtagggaggatatgaggtgtgagcggtatactagtattcctagaagtgagatggtaaatgctagtataatatttatgtaaatg

SEQ ID NO: 70322 - DNA, 120 bp, Homo sapiens
  misc_feature: 755 for SV(C|O) and mtDNA
agcctagaatttttcgttcggtaagcattaggaatgccattgcgattagaatgggtacaatgaggagtaggaggttggccatgggtatgttgttaagaagaggaattgaacctctgactg

SEQ ID NO: 70323 - DNA, 120 bp, Homo sapiens
  misc_feature: 755 for SV(C|O) and mtDNA
aggaagtatgtgcctgcgttcaggcgttctggctggttgcctcatcgggtgatgatagccaaggtggggataagtgtggtttcgaagaagatataaaatatgattagttctgtggctgtg

SEQ ID NO: 70324 - DNA, 120 bp, Homo sapiens; identical to SEQ ID NO: 55209
  misc_feature: 755 for SV(C|O) and mtDNA

SEQ ID NO: 70325 - DNA, 120 bp, Homo sapiens
  misc_feature: 755 for SV(C|O) and mtDNA
actcattcatcgacctccccaccccatccaacatctccgcatgatgaaacttcggctcactccttggcgcctgcctgatcctccaaatcaccacaggactattcctagccatgcactact

SEQ ID NO: 70326 - DNA, 120 bp, Homo sapiens
  misc_feature: 755 for SV(C|O) and mtDNA
aacttcctaccactcaccctagcattacttatatgatatgtctccatacccattacaatctccagcattccccctcaaacctaagaaatatgtctgataaaagagttactttgatagagt

SEQ ID NO: 70327 - DNA, 120 bp, Homo sapiens; identical to SEQ ID NO: 60248
  misc_feature: 755 for SV(C|O) and mtDNA

SEQ ID NO: 70328 - DNA, 120 bp, Homo sapiens
  misc_feature: 754 for SV(C|O) and mtDNA
tttttacgttgttagatatggggagtagtgtgattgaggtggagtagattaggcgtaggtagaagtagaggttaaggagggtgatggtggctatgatggtggggatgatgaggctattgt

SEQ ID NO: 70329 - DNA, 120 bp, Homo sapiens
  misc_feature: 754 for SV(C|O) and mtDNA
tttcgttcggtaagcattaggaatgccattgcgattagaatgggtacaatgaggagtaggaggttggccatgggtatgttgttaagaagaggaattgaacctctgactgtaaagttttaa

SEQ ID NO: 70330 - DNA, 120 bp, Homo sapiens
  misc_feature: 754 for SV(C|O) and mtDNA
ttcctaccactcaccctagcattacttatatgatatgtctccatacccattacaatctccagcattccccctcaaacctaagaaatatgtctgataaaagagttactttgatagagtaaa

SEQ ID NO: 70331 - DNA, 120 bp, Homo sapiens; identical to SEQ ID NO: 55377
  misc_feature: 754 for SV(C|O) and mtDNA

SEQ ID NO: 70332 - DNA, 120 bp, Homo sapiens
  misc_feature: 754 for SV(C|O) and mtDNA
ttgtagggagattagtatagagaggtagagtttttttcgtgatagtggttcactggataagtggcgttggcttgccatgattgtgaggggtaggagtcaggtagttagtattaggagggg

SEQ ID NO: 70333 - DNA, 120 bp, Homo sapiens; identical to SEQ ID NO: 51713
  misc_feature: 754 for SV(C|O) and mtDNA

SEQ ID NO: 70334 - DNA, 120 bp, Homo sapiens
  misc_feature: 754 for SV(C|O) and mtDNA
ttctatgatggaccatgtaacgaataatgctacagggatgaatattatggagaagtagtctagtttgaagcttagggagagctgggttgtttgggttgtggctcagtgtcagttcgagat

SEQ ID NO: 70335 - DNA, 120 bp, Homo sapiens
  misc_feature: 754 for SV(C|O) and mtDNA
ttacgttgttagatatggggagtagtgtgattgaggtggagtagattaggcgtaggtagaagtagaggttaaggagggtgatggtggctatgatggtggggatgatgaggctattgtttt

SEQ ID NO: 70336 - DNA, 120 bp, Homo sapiens; identical to SEQ ID NO: 52391
  misc_feature: 754 for SV(C|O) and mtDNA

SEQ ID NO: 70337 - DNA, 120 bp, Homo sapiens
  misc_feature: 754 for SV(C|O) and mtDNA
tgtcgcatccacctttattatcagtctcttccccacaacaatattcatgtgcctagaccaagaagttattatctcgaactgacactgagccacaacccaaacaacccagctctccctaag

SEQ ID NO: 70338 - DNA, 120 bp, Homo sapiens
  misc_feature: 754 for SV(C|O) and mtDNA
tctatcaccctatagaagaactaatgttagtataagtaacatgaaaacattctcctccgcataagcctgcgtcagattaaaacactgaactgacaattaacagcccaatatctacaatca

SEQ ID NO: 70339 - DNA, 120 bp, Homo sapiens
  misc_feature: 754 for SV(C|O) and mtDNA
tgaaggctcttggtctgtatttaacctaaatttctataagattattagtataaaaggggagataggtaggagtagcgtggtaagggcgatgagtgtggggaggaatggggtgggttttgt

SEQ ID NO: 70340 - DNA, 120 bp, Homo sapiens
  misc_feature: 754 for SV(C|O) and mtDNA
tctccataatattcatccctgtagcattattcgttacatggtccatcatagaattctcactgtgatatataaactcagacccaaacattaatcagttcttcaaatatctactcatcttcc

SEQ ID NO: 70341 - DNA, 120 bp, Homo sapiens; identical to SEQ ID NO: 59948
  misc_feature: 754 for SV(C|O) and mtDNA

SEQ ID NO: 70342 - DNA, 120 bp, Homo sapiens
  misc_feature: 754 for SV(C|O) and mtDNA
taatgaacagtgatagtattattccttctaggcatagtagggaggatatgaggtgtgagcggtatactagtattcctagaagtgagatggtaaatgctagtataatatttatgtaaatga

SEQ ID NO: 70343 - DNA, 120 bp, Homo sapiens
  misc_feature: 754 for SV(C|O) and mtDNA
gaacgtaggtgcgataaataataggatgaggcaggaatcaaagacagatactgcgacatagggtgctccggctccagcgtctcgcaatgctatcgcgtgcacaccccccagacgaaaata

SEQ ID NO: 70344 - DNA, 120 bp, Homo sapiens
  misc_feature: 754 for SV(C|O) and mtDNA
tattatcagtctcttccccacaacaatattcatgtgcctagaccaagaagttattatctcgaactgacactgagccacaacccaaacaacccagctctccctaagcttcaaactagacta

SEQ ID NO: 70345 - DNA, 120 bp, Homo sapiens; identical to SEQ ID NO: 57300
  misc_feature: 754 for SV(C|O) and mtDNA

SEQ ID NO: 70346 - DNA, 120 bp, Homo sapiens
  misc_feature: 754 for SV(C|O) and mtDNA
gtgtaggaagctgaataatttatgaaggagaggggtcagggttgattcgggaggatcctattggtgcgggggctttgtatgattatgggcgttgattagtagtagttactggttgaacat

SEQ ID NO: 70347 - DNA, 120 bp, Homo sapiens; identical to SEQ ID NO: 54478
  misc_feature: 754 for SV(C|O) and mtDNA

SEQ ID NO: 70348 - DNA, 120 bp, Homo sapiens; identical to SEQ ID NO: 56443
  misc_feature: 754 for SV(C|O) and mtDNA

SEQ ID NO: 70349 - DNA, 120 bp, Homo sapiens; identical to SEQ ID NO: 53465
  misc_feature: 754 for SV(C|O) and mtDNA

SEQ ID NO: 70350 - DNA, 120 bp, Homo sapiens
  misc_feature: 754 for SV(C|O) and mtDNA
ctaggctcactaaacattctactactcactctcactgcccaagaactatcaaactcctgagccaacaacttaatatgactagcttacacaatagcttttatagtaaagatacctctttac

SEQ ID NO: 70351 - DNA, 120 bp, Homo sapiens
  misc_feature: 754 for SV(C|O) and mtDNA
atcaaaaccccctccccatgcttacaagcaagtacagcaatcaaccctcaactatcacacatcaactgcaactccaaagccacccctcacccactaggataccaacaaacctactcaccc

SEQ ID NO: 70352 - DNA, 120 bp, Homo sapiens; identical to SEQ ID NO: 56745
  misc_feature: 754 for SV(C|O) and mtDNA

SEQ ID NO: 70353 - DNA, 120 bp, Homo sapiens
  misc_feature: 754 for SV(C|O) and mtDNA
aaggcgctttgtgaagtaggccttatttctcttgtcctttcgtacagggaggaatttgaagtagatagaaaccgacctggattactccggtctgaactcagatcacgtaggactttaatc

SEQ ID NO: 70354 - DNA, 120 bp, Homo sapiens
  misc_feature: 754 for SV(C|O) and mtDNA
ctggtttcaagccaaccccatggcctccatgactttttcaaaaaggtattagaaaaaccatttcataactttgtcaaagttaaattataggctaaatcctatatatcttaatggcacatg

SEQ ID NO: 70355 - DNA, 120 bp, Homo sapiens; identical to SEQ ID NO: 51733
  misc_feature: 754 for SV(C|O) and mtDNA

SEQ ID NO: 70356 - DNA, 120 bp, Homo sapiens
  misc_feature: 754 for SV(C|O) and mtDNA
cacagtgagaattctatgatggaccatgtaacgaataatgctacagggatgaatattatggagaagtagtctagtttgaagcttagggagagctgggttgtttgggttgtggctcagtgt

SEQ ID NO: 70357 - DNA, 120 bp, Homo sapiens
  misc_feature: 754 for SV(C|O) and mtDNA
agttattatcgaaaccatcagcctactcattcaaccaatagccctggccgtacgcctaaccgctaacattactgcaggccacctactcatgcacctaattggaagcgccaccctagcaat

SEQ ID NO: 70358 - DNA, 120 bp, Homo sapiens; identical to SEQ ID NO: 51869
  misc_feature: 754 for SV(C|O) and mtDNA

SEQ ID NO: 70359 - DNA, 120 bp, Homo sapiens
  misc_feature: 754 for SV(C|O) and mtDNA
aggtttggtctagggtgtagcctgagaataggggaaatcagtgaatgaagcctcctatgatggcaaatacagctcctattgataggacatagtggaagtgagctacaacgtagtacgtgt

SEQ ID NO: 70360 - DNA, 120 bp, Homo sapiens
  misc_feature: 754 for SV(C|O) and mtDNA
aatggtggagttaaagactttttctctgatttgtccttggaaaaaggttttcatctccggtttacaagactggtgtattagtttatactacaaggacaggcccatttgagtattttgttt

SEQ ID NO: 70361 - DNA, 120 bp, Homo sapiens; identical to SEQ ID NO: 54988
  misc_feature: 754 for SV(C|O) and mtDNA

SEQ ID NO: 70362 - DNA, 120 bp, Homo sapiens; identical to SEQ ID NO: 58439
  misc_feature: 753 for SV(C|O) and mtDNA

SEQ ID NO: 70363 - DNA, 120 bp, Homo sapiens
  misc_feature: 753 for SV(C|O) and mtDNA
actaaatactaccgtatggcccaccataattacccccatactccttacactattcctcatcacccaactaaaaatattaaacacaaactaccacctacctccctcaccaaagcccataaa

SEQ ID NO: 70364 - DNA, 120 bp, Homo sapiens
  misc_feature: 753 for SV(C|O) and mtDNA
tttacgttgttagatatggggagtagtgtgattgaggtggagtagattaggcgtaggtagaagtagaggttaaggagggtgatggtggctatgatggtggggatgatgaggctattgttt

SEQ ID NO: 70365 - DNA, 120 bp, Homo sapiens; identical to SEQ ID NO: 58256
  misc_feature: 753 for SV(C|O) and mtDNA

SEQ ID NO: 70366 - DNA, 120 bp, Homo sapiens
  misc_feature: 753 for SV(C|O) and mtDNA
ttctaggatagtcagtagaattagaattgtgaagatgataagtgtagagggaaggttaatggttgatattgctagggtggcgcttccaattaggtgcatgagtaggtggcctgcagtaat

SEQ ID NO: 70367 - DNA, 120 bp, Homo sapiens; identical to SEQ ID NO: 52606
  misc_feature: 753 for SV(C|O) and mtDNA

SEQ ID NO: 70368 - DNA, 120 bp, Homo sapiens
  misc_feature: 753 for SV(C|O) and mtDNA
tcttagctttgggtgctaatggtggagttaaagactttttctctgatttgtccttggaaaaaggttttcatctccggtttacaagactggtgtattagtttatactacaaggacaggccc

SEQ ID NO: 70369 - DNA, 120 bp, Homo sapiens
  misc_feature: 753 for SV(C|O) and mtDNA
tccccacaacaatattcatgtgcctagaccaagaagttattatctcgaactgacactgagccacaacccaaacaacccagctctccctaagcttcaaactagactacttctccataatat

SEQ ID NO: 70370 - DNA, 120 bp, Homo sapiens; identical to SEQ ID NO: 58208
  misc_feature: 753 for SV(C|O) and mtDNA

SEQ ID NO: 70371 - DNA, 120 bp, Homo sapiens
  misc_feature: 753 for SV(C|O) and mtDNA
gtatcatcaactgatgagcaagaaggatataattcctacgccctctcagccgatgaacagttggaataggttgttagcggtaactaagattagtatggtaattaggaagatgagtagata

SEQ ID NO: 70372 - DNA, 120 bp, Homo sapiens; identical to SEQ ID NO: 52067
  misc_feature: 753 for SV(C|O) and mtDNA

SEQ ID NO: 70373 - DNA, 120 bp, Homo sapiens
  misc_feature: 753 for SV(C|O) and mtDNA
tagaataggaagtatgtgcctgcgttcaggcgttctggctggttgcctcatcgggtgatgatagccaaggtggggataagtgtggtttcgaagaagatataaaatatgattagttctgtg

SEQ ID NO: 70374 - DNA, 120 bp, Homo sapiens
  misc_feature: 753 for SV(C|O) and mtDNA
taaggggtggatttttctatgtagccgttgagttgtggtagtcaaaatgtaataattattagtagtaaggctaggagggtgttgattattaaaattaaggcgaagtttattactcttttt

SEQ ID NO: 70375 - DNA, 120 bp, Homo sapiens
  misc_feature: 753 for SV(C|O) and mtDNA
taactaaaacccctacgcatttatatagaggagacaagtcgtaacatggtaagtgtactggaaagtgcacttggacgaaccagagtgtagcttaacacaaagcacccaacttacacttag

SEQ ID NO: 70376 - DNA, 120 bp, Homo sapiens
  misc_feature: 753 for SV(C|O) and mtDNA
accctagtaggctcccttcccctactcatcgcactaatttacactcacaacaccctaggctcactaaacattctactactcactctcactgcccaagaactatcaaactcctgagccaac

SEQ ID NO: 70377 - DNA, 120 bp, Homo sapiens; identical to SEQ ID NO: 55356
  misc_feature: 753 for SV(C|O) and mtDNA

SEQ ID NO: 70378 - DNA, 120 bp, Homo sapiens
  misc_feature: 753 for SV(C|O) and mtDNA
attatcagtctcttccccacaacaatattcatgtgcctagaccaagaagttattatctcgaactgacactgagccacaacccaaacaacccagctctccctaagcttcaaactagactac

SEQ ID NO: 70379 - DNA, 120 bp, Homo sapiens
  misc_feature: 753 for SV(C|O) and mtDNA
gggggaaggcgctttgtgaagtaggccttatttctcttgtcctttcgtacagggaggaatttgaagtagatagaaaccgacctggattactccggtctgaactcagatcacgtaggactt

SEQ ID NO: 70380 - DNA, 120 bp, Homo sapiens
  misc_feature: 753 for SV(C|O) and mtDNA
acatacaaaacccaccccattcctccccacactcatcgcccttaccacgctactcctacctatctccccttttatactaataatcttatagaaatttaggttaaatacagaccaagagcc

SEQ ID NO: 70381 - DNA, 120 bp, Homo sapiens; identical to SEQ ID NO: 52664
  misc_feature: 753 for SV(C|O) and mtDNA

SEQ ID NO: 70382 - DNA, 120 bp, Homo sapiens
  misc_feature: 753 for SV(C|O) and mtDNA
gctatgtacggtaaatggctttatgtactatgtgctgttaagggtgagtaggtttgttggtatcctagtgggtgaggggtggctttggagttgcagttgatgtgtgatagttgagggttg

SEQ ID NO: 70383 - DNA, 120 bp, Homo sapiens
  misc_feature: 753 for SV(C|O) and mtDNA
gcataattaaactttacttcctctctttcttcttcccactcatcctaaccctactcctaatcacataacctattcccccgagcaatctcaattacaatatatacaccaacaaacaatgtt

SEQ ID NO: 70384 - DNA, 120 bp, Homo sapiens
  misc_feature: 753 for SV(C|O) and mtDNA
gaagaacccgtatacataaaatctagacaaaaaaggaaggaatcgaaccccccaaagctggtttcaagccaaccccatggcctccatgactttttcaaaaaggtattagaaaaaccattt

SEQ ID NO: 70385 - DNA, 120 bp, Homo sapiens; identical to SEQ ID NO: 55366
  misc_feature: 753 for SV(C|O) and mtDNA

SEQ ID NO: 70386 - DNA, 120 bp, Homo sapiens
  misc_feature: 753 for SV(C|O) and mtDNA
aataataggatgaggcaggaatcaaagacagatactgcgacatagggtgctccggctccagcgtctcgcaatgctatcgcgtgcacaccccccagacgaaaataccaaatgcatggagag

SEQ ID NO: 70387 - DNA, 120 bp, Homo sapiens
  misc_feature: 753 for SV(C|O) and mtDNA
aaacttcctaccactcaccctagcattacttatatgatatgtctccatacccattacaatctccagcattccccctcaaacctaagaaatatgtctgataaaagagttactttgatagag

SEQ ID NO: 70388 - DNA, 120 bp, Homo sapiens
  misc_feature: 753 for SV(C|O) and mtDNA
ctccataatattcatccctgtagcattattcgttacatggtccatcatagaattctcactgtgatatataaactcagacccaaacattaatcagttcttcaaatatctactcatcttcct

SEQ ID NO: 70389 - DNA, 120 bp, Homo sapiens
  misc_feature: 753 for SV(C|O) and mtDNA
aatgaacagtgatagtattattccttctaggcatagtagggaggatatgaggtgtgagcggtatactagtattcctagaagtgagatggtaaatgctagtataatatttatgtaaatgag

SEQ ID NO: 70390 - DNA, 120 bp, Homo sapiens
  misc_feature: 753 for SV(C|O) and mtDNA
atgtttcatgtggtgtatgcatcggggtagtccgagtaacgtcggggcattccggataggccgagaaagtgttgtgggaagaaagttagatttacgccgatgaatatgatagtgaaatgg

SEQ ID NO: 70391 - DNA, 120 bp, Homo sapiens
  misc_feature: 753 for SV(C|O) and mtDNA
attaaccactcattcatcgacctccccaccccatccaacatctccgcatgatgaaacttcggctcactccttggcgcctgcctgatcctccaaatcaccacaggactattcctagccatg

SEQ ID NO: 70392 - DNA, 120 bp, Homo sapiens; identical to SEQ ID NO: 55734
  misc_feature: 753 for SV(C|O) and mtDNA

SEQ ID NO: 70393 - DNA, 120 bp, Homo sapiens
  misc_feature: 753 for SV(C|O) and mtDNA
aggagggcactggcccccaacaggcatcaccccgctaaatcccctagaagtcccactcctaaacacatccgtattactcgcatcaggagtatcaatcacctgagctcaccatagtctaat

SEQ ID NO: 70394 - DNA, 120 bp, Homo sapiens
  misc_feature: 753 for SV(C|O) and mtDNA
agggagattagtatagagaggtagagtttttttcgtgatagtggttcactggataagtggcgttggcttgccatgattgtgaggggtaggagtcaggtagttagtattaggaggggggtt

SEQ ID NO: 70395 - DNA, 120 bp, Homo sapiens
  misc_feature: 752 for SV(C|O) and mtDNA
ttggtttcggttgttttctattagactatggtgagctcaggtgattgatactcctgatgcgagtaatacggatgtgtttaggagtgggacttctaggggatttagcggggtgatgcctgt

SEQ ID NO: 70396 - DNA, 120 bp, Homo sapiens
  misc_feature: 752 for SV(C|O) and mtDNA
ttccccctctattgatccccacctccaaatatctcatcaacaaccgactaatcaccacccaacaatgactaatcaaactaacctcaaaacaaatgataaccatacacaacactaaaggac

SEQ ID NO: 70397 - DNA, 120 bp, Homo sapiens
  misc_feature: 752 for SV(C|O) and mtDNA
ttccccacaacaatattcatgtgcctagaccaagaagttattatctcgaactgacactgagccacaacccaaacaacccagctctccctaagcttcaaactagactacttctccataata

SEQ ID NO: 70398 - DNA, 120 bp, Homo sapiens; identical to SEQ ID NO: 54722
  misc_feature: 752 for SV(C|O) and mtDNA

SEQ ID NO: 70399 - DNA, 120 bp, Homo sapiens
  misc_feature: 752 for SV(C|O) and mtDNA
tagccaaaccatttacccaaataaagtataggcgatagaaattgaaacctggcgcaatagatatagtaccgcaagggaaagatgaaaaattataaccaagcataatacagcaaggactaa

SEQ ID NO: 70400 - DNA, 120 bp, Homo sapiens; identical to SEQ ID NO: 55565
  misc_feature: 752 for SV(C|O) and mtDNA

SEQ ID NO: 70401 - DNA, 120 bp, Homo sapiens
  misc_feature: 752 for SV(C|O) and mtDNA
aaggagaggggtcagggttgattcgggaggatcctattggtgcgggggctttgtatgattatgggcgttgattagtagtagttactggttgaacattgtttgttggtgtatatattgtaa

SEQ ID NO: 70402 - DNA, 120 bp, Homo sapiens
  misc_feature: 752 for SV(C|O) and mtDNA
tcaagtatttcctcacgcaagcaaccgcatccataatccttctaatagctatcctcttcaacaatatactctccggacaatgaaccataaccaatactaccaatcaatactcatcattaa

SEQ ID NO: 70403 - DNA, 120 bp, Homo sapiens; identical to SEQ ID NO: 52456
  misc_feature: 752 for SV(C|O) and mtDNA

SEQ ID NO: 70404 - DNA, 120 bp, Homo sapiens
  misc_feature: 752 for SV(C|O) and mtDNA
taattaaccactcattcatcgacctccccaccccatccaacatctccgcatgatgaaacttcggctcactccttggcgcctgcctgatcctccaaatcaccacaggactattcctagcca

SEQ ID NO: 70405 - DNA, 120 bp, Homo sapiens
  misc_feature: 752 for SV(C|O) and mtDNA
ggtggagttaaagactttttctctgatttgtccttggaaaaaggttttcatctccggtttacaagactggtgtattagtttatactacaaggacaggcccatttgagtattttgttttca

SEQ ID NO: 70406 - DNA, 120 bp, Homo sapiens
  misc_feature: 752 for SV(C|O) and mtDNA
ctttattatcagtctcttccccacaacaatattcatgtgcctagaccaagaagttattatctcgaactgacactgagccacaacccaaacaacccagctctccctaagcttcaaactaga

SEQ ID NO: 70407 - DNA, 120 bp, Homo sapiens
  misc_feature: 752 for SV(C|O) and mtDNA
tccgtggaagcctgtggctacaaaaaatgttgagccgtagatgccgtcggaaatggtgaagggagactcgaagtactctgaggcttgtaggagggtaaaatagagacccagtaaaattgt

SEQ ID NO: 70408 - DNA, 120 bp, Homo sapiens
  misc_feature: 752 for SV(C|O) and mtDNA
tccacatcaaaaccccctccccatgcttacaagcaagtacagcaatcaaccctcaactatcacacatcaactgcaactccaaagccacccctcacccactaggataccaacaaacctact

SEQ ID NO: 70409 - DNA, 120 bp, Homo sapiens; identical to SEQ ID NO: 54859
  misc_feature: 752 for SV(C|O) and mtDNA

SEQ ID NO: 70410 - DNA, 120 bp, Homo sapiens; identical to SEQ ID NO: 58682
  misc_feature: 752 for SV(C|O) and mtDNA

SEQ ID NO: 70411 - DNA, 120 bp, Homo sapiens
  misc_feature: 752 for SV(C|O) and mtDNA
taagaccaatggatagctgttatcctttaaaagttgagaaagccatgttgttagacatgggggcatgagttagcagttcttgtgagctttctcggtaaataaggggtcgtaagcctctgt

SEQ ID NO: 70412 - DNA, 120 bp, Homo sapiens; identical to SEQ ID NO: 54394
  misc_feature: 752 for SV(C|O) and mtDNA

SEQ ID NO: 70413 - DNA, 120 bp, Homo sapiens
  misc_feature: 752 for SV(C|O) and mtDNA
gttaccctagggataacagcgcaatcctattctagagtccatatcaacaatagggtttacgacctcgatgttggatcaggacatcccgatggtgcagccgctattaaaggttcgtttgtt

SEQ ID NO: 70414 - DNA, 120 bp, Homo sapiens; identical to SEQ ID NO: 52786
  misc_feature: 752 for SV(C|O) and mtDNA

SEQ ID NO: 70415 - DNA, 120 bp, Homo sapiens; identical to SEQ ID NO: 52787
  misc_feature: 752 for SV(C|O) and mtDNA

SEQ ID NO: 70416 - DNA, 120 bp, Homo sapiens
  misc_feature: 752 for SV(C|O) and mtDNA
aacaaaacgaatgatttcgactcattaaattatgataatcatatttaccaaatgcccctcatttacataaatattatactagcatttaccatctcacttctaggaatactagtataccgc

SEQ ID NO: 70417 - DNA, 120 bp, Homo sapiens
  misc_feature: 752 for SV(C|O) and mtDNA
gcatctgctcgggcgtatcatcaactgatgagcaagaaggatataattcctacgccctctcagccgatgaacagttggaataggttgttagcggtaactaagattagtatggtaattagg

SEQ ID NO: 70418 - DNA, 120 bp, Homo sapiens
  misc_feature: 752 for SV(C|O) and mtDNA
cagttcttcaaatatctactcatcttcctaattaccatactaatcttagttaccgctaacaacctattccaactgttcatcggctgagagggcgtaggaattatatccttcttgctcatc

SEQ ID NO: 70419 - DNA, 120 bp, Homo sapiens
  misc_feature: 752 for SV(C|O) and mtDNA
acaacaatattcatgtgcctagaccaagaagttattatctcgaactgacactgagccacaacccaaacaacccagctctccctaagcttcaaactagactacttctccataatattcatc

SEQ ID NO: 70420 - DNA, 120 bp, Homo sapiens
  misc_feature: 752 for SV(C|O) and mtDNA
atgagtaggggaagggagcctactagggtgtagaataggaagtatgtgcctgcgttcaggcgttctggctggttgcctcatcgggtgatgatagccaaggtggggataagtgtggtttcg

SEQ ID NO: 70421 - DNA, 120 bp, Homo sapiens
  misc_feature: 752 for SV(C|O) and mtDNA
atttgtagggagattagtatagagaggtagagtttttttcgtgatagtggttcactggataagtggcgttggcttgccatgattgtgaggggtaggagtcaggtagttagtattaggagg

SEQ ID NO: 70422 - DNA, 120 bp, Homo sapiens; identical to SEQ ID NO: 58123
  misc_feature: 752 for SV(C|O) and mtDNA

SEQ ID NO: 70423 - DNA, 120 bp, Homo sapiens
  misc_feature: 752 for SV(C|O) and mtDNA
attattgctaggatgaggatggatagtaatagggcaaggacgcctcctagtttgttagggacggatcggagaattgtgtaggcgaataggaaatatcattcgggcttgatgtggggaggg

SEQ ID NO: 70424 - DNA, 120 bp, Homo sapiens
  misc_feature: 752 for SV(C|O) and mtDNA
ccatcaagtatttcctcacgcaagcaaccgcatccataatccttctaatagctatcctcttcaacaatatactctccggacaatgaaccataaccaatactaccaatcaatactcatcat

SEQ ID NO: 70425 - DNA, 120 bp, Homo sapiens; identical to SEQ ID NO: 55078
  misc_feature: 752 for SV(C|O) and mtDNA

SEQ ID NO: 70426 - DNA, 120 bp, Homo sapiens
  misc_feature: 752 for SV(C|O) and mtDNA
aattaggaagatgagtagatatttgaagaactgattaatgtttgggtctgagtttatatatcacagtgagaattctatgatggaccatgtaacgaataatgctacagggatgaatattat

SEQ ID NO: 70427 - DNA, 120 bp, Homo sapiens
  misc_feature: 752 for SV(C|O) and mtDNA
agggtgtagaataggaagtatgtgcctgcgttcaggcgttctggctggttgcctcatcgggtgatgatagccaaggtggggataagtgtggtttcgaagaagatataaaatatgattagt

SEQ ID NO: 70428 - DNA, 120 bp, Homo sapiens; identical to SEQ ID NO: 57958
  misc_feature: 751 for SV(C|O) and mtDNA

SEQ ID NO: 70429 - DNA, 120 bp, Homo sapiens; identical to SEQ ID NO: 59368
  misc_feature: 751 for SV(C|O) and mtDNA

SEQ ID NO: 70430 - DNA, 120 bp, Homo sapiens
  misc_feature: 751 for SV(C|O) and mtDNA
gagtctcccttcaccatttccgacggcatctacggctcaacattttttgtagccacaggcttccacggacttcacgtcattattggctcaactttcctcactatctgcttcatccgccaa

SEQ ID NO: 70431 - DNA, 120 bp, Homo sapiens
  misc_feature: 751 for SV(C|O) and mtDNA
ttaattttaataatcaacaccctcctagccttactactaataattattacattttgactaccacaactcaacggctacatagaaaaatccaccccttacgagtgcggcttcgaccctata

SEQ ID NO: 70432 - DNA, 120 bp, Homo sapiens
  misc_feature: 751 for SV(C|O) and mtDNA
ggttttcttctaagccttctcctatttatgggggtttagtattgattgttagcggtgtggtcgggtgtgttattattctgaattttgggggaggttatatgggtttaatagtttttttaa

SEQ ID NO: 70433 - DNA, 120 bp, Homo sapiens
  misc_feature: 751 for SV(C|O) and mtDNA
tgtttcatgtggtgtatgcatcggggtagtccgagtaacgtcggggcattccggataggccgagaaagtgttgtgggaagaaagttagatttacgccgatgaatatgatagtgaaatgga

SEQ ID NO: 70434 - DNA, 120 bp, Homo sapiens
  misc_feature: 751 for SV(C|O) and mtDNA
taagagaaccaacacctctttacagtgaaatgccccaactaaatactaccgtatggcccaccataattacccccatactccttacactattcctcatcacccaactaaaaatattaaaca

SEQ ID NO: 70435 - DNA, 120 bp, Homo sapiens
  misc_feature: 751 for SV(C|O) and mtDNA
acacgacacgtactacgttgtagctcacttccactatgtcctatcaataggagctgtatttgccatcataggaggcttcattcactgatttcccctattctcaggctacaccctagacca

SEQ ID NO: 70436 - DNA, 120 bp, Homo sapiens
  misc_feature: 751 for SV(C|O) and mtDNA
gttaacttccaattaactagttttgacaacattcaaaaaagagtaataaacttcgccttaattttaataatcaacaccctcctagccttactactaataattattacattttgactacca

SEQ ID NO: 70437 - DNA, 120 bp, Homo sapiens
  misc_feature: 751 for SV(C|O) and mtDNA
taccatctcacttctaggaatactagtataccgctcacacctcatatcctccctactatgcctagaaggaataatactatcactgttcattatagctactctcataaccctcaacaccca

SEQ ID NO: 70438 - DNA, 120 bp, Homo sapiens
  misc_feature: 751 for SV(C|O) and mtDNA
tgaaatggattttggcgtaggtttggtctagggtgtagcctgagaataggggaaatcagtgaatgaagcctcctatgatggcaaatacagctcctattgataggacatagtggaagtgag

SEQ ID NO: 70439 - DNA, 120 bp, Homo sapiens
  misc_feature: 751 for SV(C|O) and mtDNA
aagtatttatggtaccgtacaatattcatggtggctggcagtaatgtacgaattacatagcggttgttgatgggtgagtcaatacttgggtggcacccaaatctgcttccccatgaaaga

SEQ ID NO: 70440 - DNA, 120 bp, Homo sapiens
  misc_feature: 751 for SV(C|O) and mtDNA
tctcgtcttgctgtgtcatgcccgcctcttcacgggcaggtcaatttcactggttaaaagtaagagacagctgaaccctcgtggagccattcatacaggtccctatttaaggaacaagtg

SEQ ID NO: 70441 - DNA, 120 bp, Homo sapiens
  misc_feature: 751 for SV(C|O) and mtDNA
taaaacccctacgcatttatatagaggagacaagtcgtaacatggtaagtgtactggaaagtgcacttggacgaaccagagtgtagcttaacacaaagcacccaacttacacttaggaga

SEQ ID NO: 70442 - DNA, 120 bp, Homo sapiens; identical to SEQ ID NO: 55165
  misc_feature: 751 for SV(C|O) and mtDNA

SEQ ID NO: 70443 - DNA, 120 bp, Homo sapiens
  misc_feature: 751 for SV(C|O) and mtDNA
tcccgtatcgaaggcctttttggacaggtggtgtgtggtggccttggtatgtgctttctcgtgttacatcgcgccatcattggtatatggttagtgtgttggttagtaggcctagtatga

SEQ ID NO: 70444 - DNA, 120 bp, Homo sapiens
  misc_feature: 751 for SV(C|O) and mtDNA
tatagcctagaatttttcgttcggtaagcattaggaatgccattgcgattagaatgggtacaatgaggagtaggaggttggccatgggtatgttgttaagaagaggaattgaacctctga

SEQ ID NO: 70445 - DNA, 120 bp, Homo sapiens; identical to SEQ ID NO: 59814
  misc_feature: 751 for SV(C|O) and mtDNA

SEQ ID NO: 70446 - DNA, 120 bp, Homo sapiens
  misc_feature: 751 for SV(C|O) and mtDNA
tatgatggaccatgtaacgaataatgctacagggatgaatattatggagaagtagtctagtttgaagcttagggagagctgggttgtttgggttgtggctcagtgtcagttcgagataat

SEQ ID NO: 70447 - DNA, 120 bp, Homo sapiens
  misc_feature: 751 for SV(C|O) and mtDNA
tatatagcctagaatttttcgttcggtaagcattaggaatgccattgcgattagaatgggtacaatgaggagtaggaggttggccatgggtatgttgttaagaagaggaattgaacctct

SEQ ID NO: 70448 - DNA, 120 bp, Homo sapiens
  misc_feature: 751 for SV(C|O) and mtDNA
ccactcattcatcgacctccccaccccatccaacatctccgcatgatgaaacttcggctcactccttggcgcctgcctgatcctccaaatcaccacaggactattcctagccatgcacta

SEQ ID NO: 70449 - DNA, 120 bp, Homo sapiens; identical to SEQ ID NO: 52195
  misc_feature: 751 for SV(C|O) and mtDNA

SEQ ID NO: 70450 - DNA, 120 bp, Homo sapiens
  misc_feature: 751 for SV(C|O) and mtDNA
gaaggctcttggtctgtatttaacctaaatttctataagattattagtataaaaggggagataggtaggagtagcgtggtaagggcgatgagtgtggggaggaatggggtgggttttgta

SEQ ID NO: 70451 - DNA, 120 bp, Homo sapiens
  misc_feature: 751 for SV(C|O) and mtDNA
taacagcagtaatattaataattttcatgatttgagaagccttcgcttcgaagcgaaaagtcctaatagtagaagaaccctccataaacctggagtgactatatggatgccccccaccct

SEQ ID NO: 70452 - DNA, 120 bp, Homo sapiens
  misc_feature: 751 for SV(C|O) and mtDNA
atttaccatctcacttctaggaatactagtataccgctcacacctcatatcctccctactatgcctagaaggaataatactatcactgttcattatagctactctcataaccctcaacac

SEQ ID NO: 70453 - DNA, 120 bp, Homo sapiens; identical to SEQ ID NO: 52183
  misc_feature: 751 for SV(C|O) and mtDNA

SEQ ID NO: 70454 - DNA, 120 bp, Homo sapiens
  misc_feature: 751 for SV(C|O) and mtDNA
gtaaggggtggatttttctatgtagccgttgagttgtggtagtcaaaatgtaataattattagtagtaaggctaggagggtgttgattattaaaattaaggcgaagtttattactctttt

SEQ ID NO: 70455 - DNA, 120 bp, Homo sapiens
  misc_feature: 751 for SV(C|O) and mtDNA
atcgtactacacgacacgtactacgttgtagctcacttccactatgtcctatcaataggagctgtatttgccatcataggaggcttcattcactgatttcccctattctcaggctacacc

SEQ ID NO: 70456 - DNA, 120 bp, Homo sapiens
  misc_feature: 751 for SV(C|O) and mtDNA
gatgatgctaataattaggctgtgggtggttgtgttgattcaaattatgtgttttttggaaagtcatgtcagtggtagtaatataattgttgggacgattagttttagcattggagtagg

SEQ ID NO: 70457 - DNA, 120 bp, Homo sapiens; identical to SEQ ID NO: 60835
  misc_feature: 751 for SV(C|O) and mtDNA

SEQ ID NO: 70458 - DNA, 120 bp, Homo sapiens
  misc_feature: 751 for SV(C|O) and mtDNA
gaatgccccgacgttactcggactaccccgatgcatacaccacatgaaacatcctatcatctgtaggctcattcatttctctaacagcagtaatattaataattttcatgatttgagaag

SEQ ID NO: 70459 - DNA, 120 bp, Homo sapiens
  misc_feature: 751 for SV(C|O) and mtDNA
ataaaattaattaaccactcattcatcgacctccccaccccatccaacatctccgcatgatgaaacttcggctcactccttggcgcctgcctgatcctccaaatcaccacaggactattc

SEQ ID NO: 70460 - DNA, 120 bp, Homo sapiens
  misc_feature: 751 for SV(C|O) and mtDNA
gaaacctggcgcaatagatatagtaccgcaagggaaagatgaaaaattataaccaagcataatacagcaaggactaacccctataccttctgcataatgaattaactagaaataactttg

SEQ ID NO: 70461 - DNA, 120 bp, Homo sapiens; identical to SEQ ID NO: 59469
  misc_feature: 751 for SV(C|O) and mtDNA

SEQ ID NO: 70462 - DNA, 120 bp, Homo sapiens; identical to SEQ ID NO: 57980
  misc_feature: 751 for SV(C|O) and mtDNA

SEQ ID NO: 70463 - DNA, 120 bp, Homo sapiens
  misc_feature: 751 for SV(C|O) and mtDNA
cgcctgtttaccaaaaacatcacctctagcatcaccagtattagaggcaccgcctgcccagtgacacatgtttaacggccgcggtaccctaaccgtgcaaaggtagcataatcacttgtt

SEQ ID NO: 70464 - DNA, 120 bp, Homo sapiens
  misc_feature: 751 for SV(C|O) and mtDNA
ccttatttaccgagaaagctcacaagaactgctaactcatgcccccatgtctaacaacatggctttctcaacttttaaaggataacagctatccattggtcttaggccccaaaaattttg

SEQ ID NO: 70465 - DNA, 120 bp, Homo sapiens
  misc_feature: 751 for SV(C|O) and mtDNA
aggatggggattattgctaggatgaggatggatagtaatagggcaaggacgcctcctagtttgttagggacggatcggagaattgtgtaggcgaataggaaatatcattcgggcttgatg

SEQ ID NO: 70466 - DNA, 120 bp, Homo sapiens
  misc_feature: 751 for SV(C|O) and mtDNA
aaggcttagaagaaaaccccacaaaccccattactaaacccacactcaacagaaacaaagcatacatcattattctcgcacggactacaaccacgaccaatgatatgaaaaaccatcgtt

SEQ ID NO: 70467 - DNA, 120 bp, Homo sapiens
  misc_feature: 750 for SV(C|O) and mtDNA
ccaaacccactccaccttactaccagacaaccttagccaaaccatttacccaaataaagtataggcgatagaaattgaaacctggcgcaatagatatagtaccgcaagggaaagatgaaa

SEQ ID NO: 70468 - DNA, 120 bp, Homo sapiens
  misc_feature: 750 for SV(C|O) and mtDNA
tttcatatcattggtcgtggttgtagtccgtgcgagaataatgatgtatgctttgtttctgttgagtgtgggtttagtaatggggtttgtggggttttcttctaagccttctcctattta

SEQ ID NO: 70469 - DNA, 120 bp, Homo sapiens; identical to SEQ ID NO: 52933
  misc_feature: 750 for SV(C|O) and mtDNA

SEQ ID NO: 70470 - DNA, 120 bp, Homo sapiens
  misc_feature: 750 for SV(C|O) and mtDNA
ttcgttcggtaagcattaggaatgccattgcgattagaatgggtacaatgaggagtaggaggttggccatgggtatgttgttaagaagaggaattgaacctctgactgtaaagttttaag

SEQ ID NO: 70471 - DNA, 120 bp, Homo sapiens; identical to SEQ ID NO: 53868
  misc_feature: 750 for SV(C|O) and mtDNA

SEQ ID NO: 70472 - DNA, 120 bp, Homo sapiens
  misc_feature: 750 for SV(C|O) and mtDNA
tctatttccccctctattgatccccacctccaaatatctcatcaacaaccgactaatcaccacccaacaatgactaatcaaactaacctcaaaacaaatgataaccatacacaacactaa

SEQ ID NO: 70473 - DNA, 120 bp, Homo sapiens
  misc_feature: 750 for SV(C|O) and mtDNA
ttagctttgggtgctaatggtggagttaaagactttttctctgatttgtccttggaaaaaggttttcatctccggtttacaagactggtgtattagtttatactacaaggacaggcccat

SEQ ID NO: 70474 - DNA, 120 bp, Homo sapiens
  misc_feature: 750 for SV(C|O) and mtDNA
ttaaccactcattcatcgacctccccaccccatccaacatctccgcatgatgaaacttcggctcactccttggcgcctgcctgatcctccaaatcaccacaggactattcctagccatgc

SEQ ID NO: 70475 - DNA, 120 bp, Homo sapiens
  misc_feature: 750 for SV(C|O) and mtDNA
tggtttcggttgttttctattagactatggtgagctcaggtgattgatactcctgatgcgagtaatacggatgtgtttaggagtgggacttctaggggatttagcggggtgatgcctgtt

SEQ ID NO: 70476 - DNA, 120 bp, Homo sapiens
  misc_feature: 750 for SV(C|O) and mtDNA
cttagctttgggtgctaatggtggagttaaagactttttctctgatttgtccttggaaaaaggttttcatctccggtttacaagactggtgtattagtttatactacaaggacaggccca

SEQ ID NO: 70477 - DNA, 120 bp, Homo sapiens
  misc_feature: 750 for SV(C|O) and mtDNA
cgagtctcccttcaccatttccgacggcatctacggctcaacattttttgtagccacaggcttccacggacttcacgtcattattggctcaactttcctcactatctgcttcatccgcca

SEQ ID NO: 70478 - DNA, 120 bp, Homo sapiens; identical to SEQ ID NO: 54359
  misc_feature: 750 for SV(C|O) and mtDNA

SEQ ID NO: 70479 - DNA, 120 bp, Homo sapiens
  misc_feature: 750 for SV(C|O) and mtDNA
cgaagcgaaaagtcctaatagtagaagaaccctccataaacctggagtgactatatggatgccccccaccctaccacacattcgaagaacccgtatacataaaatctagacaaaaaagga

SEQ ID NO: 70480 - DNA, 120 bp, Homo sapiens
  misc_feature: 750 for SV(C|O) and mtDNA
cgtatcgaaggcctttttggacaggtggtgtgtggtggccttggtatgtgctttctcgtgttacatcgcgccatcattggtatatggttagtgtgttggttagtaggcctagtatgagga

SEQ ID NO: 70481 - DNA, 120 bp, Homo sapiens; identical to SEQ ID NO: 51947
  misc_feature: 750 for SV(C|O) and mtDNA

SEQ ID NO: 70482 - DNA, 120 bp, Homo sapiens
  misc_feature: 750 for SV(C|O) and mtDNA
tcatatcattggtcgtggttgtagtccgtgcgagaataatgatgtatgctttgtttctgttgagtgtgggtttagtaatggggtttgtggggttttcttctaagccttctcctatttatg

SEQ ID NO: 70483 - DNA, 120 bp, Homo sapiens
  misc_feature: 750 for SV(C|O) and mtDNA
ctcgtcttgctgtgtcatgcccgcctcttcacgggcaggtcaatttcactggttaaaagtaagagacagctgaaccctcgtggagccattcatacaggtccctatttaaggaacaagtga

SEQ ID NO: 70484 - DNA, 120 bp, Homo sapiens; identical to SEQ ID NO: 60825
  misc_feature: 750 for SV(C|O) and mtDNA

SEQ ID NO: 70485 - DNA, 120 bp, Homo sapiens; identical to SEQ ID NO: 56631
  misc_feature: 750 for SV(C|O) and mtDNA

SEQ ID NO: 70486 - DNA, 120 bp, Homo sapiens
  misc_feature: 750 for SV(C|O) and mtDNA
taggaagtatgtgcctgcgttcaggcgttctggctggttgcctcatcgggtgatgatagccaaggtggggataagtgtggtttcgaagaagatataaaatatgattagttctgtggctgt

SEQ ID NO: 70487 - DNA, 120 bp, Homo sapiens; identical to SEQ ID NO: 55706
  misc_feature: 750 for SV(C|O) and mtDNA

SEQ ID NO: 70488 - DNA, 120 bp, Homo sapiens
  misc_feature: 750 for SV(C|O) and mtDNA
ctaaccccactaaaacactcaccaagacctcaacccctgacccccatgcctcaggatactcctcaatagccatcgctgtagtatatccaaagacaaccatcattccccctaaataaatta

SEQ ID NO: 70489 - DNA, 120 bp, Homo sapiens; identical to SEQ ID NO: 59170
  misc_feature: 750 for SV(C|O) and mtDNA

SEQ ID NO: 70490 - DNA, 120 bp, Homo sapiens; identical to SEQ ID NO: 55645
  misc_feature: 750 for SV(C|O) and mtDNA

SEQ ID NO: 70491 - DNA, 120 bp, Homo sapiens; identical to SEQ ID NO: 52450
  misc_feature: 750 for SV(C|O) and mtDNA

SEQ ID NO: 70492 - DNA, 120 bp, Homo sapiens
  misc_feature: 750 for SV(C|O) and mtDNA
atcttagctttgggtgctaatggtggagttaaagactttttctctgatttgtccttggaaaaaggttttcatctccggtttacaagactggtgtattagtttatactacaaggacaggcc

SEQ ID NO: 70493 - DNA, 120 bp, Homo sapiens; identical to SEQ ID NO: 55871
  misc_feature: 750 for SV(C|O) and mtDNA

SEQ ID NO: 70494 - DNA, 120 bp, Homo sapiens
  misc_feature: 750 for SV(C|O) and mtDNA
ccacatcaaaaccccctccccatgcttacaagcaagtacagcaatcaaccctcaactatcacacatcaactgcaactccaaagccacccctcacccactaggataccaacaaacctactc

SEQ ID NO: 70495 - DNA, 120 bp, Homo sapiens
  misc_feature: 750 for SV(C|O) and mtDNA
aaaaatcccaaacatataactgaactcctcacacccaattggaccaatctatcaccctatagaagaactaatgttagtataagtaacatgaaaacattctcctccgcataagcctgcgtc

SEQ ID NO: 70496 - DNA, 120 bp, Homo sapiens
  misc_feature: 750 for SV(C|O) and mtDNA
caagtatttatggtaccgtacaatattcatggtggctggcagtaatgtacgaattacatagcggttgttgatgggtgagtcaatacttgggtggcacccaaatctgcttccccatgaaag

SEQ ID NO: 70497 - DNA, 120 bp, Homo sapiens
  misc_feature: 750 for SV(C|O) and mtDNA
agtaggggaagggagcctactagggtgtagaataggaagtatgtgcctgcgttcaggcgttctggctggttgcctcatcgggtgatgatagccaaggtggggataagtgtggtttcgaag

SEQ ID NO: 70498 - DNA, 120 bp, Homo sapiens
  misc_feature: 750 for SV(C|O) and mtDNA
cttaattttaataatcaacaccctcctagccttactactaataattattacattttgactaccacaactcaacggctacatagaaaaatccaccccttacgagtgcggcttcgaccctat

SEQ ID NO: 70499 - DNA, 120 bp, Homo sapiens; identical to SEQ ID NO: 54132
  misc_feature: 750 for SV(C|O) and mtDNA

SEQ ID NO: 70500 - DNA, 120 bp, Homo sapiens; identical to SEQ ID NO: 60422
  misc_feature: 750 for SV(C|O) and mtDNA

SEQ ID NO: 70501 - DNA, 120 bp, Homo sapiens
  misc_feature: 750 for SV(C|O) and mtDNA
aggcttagaagaaaaccccacaaaccccattactaaacccacactcaacagaaacaaagcatacatcattattctcgcacggactacaaccacgaccaatgatatgaaaaaccatcgttg

SEQ ID NO: 70502 - DNA, 120 bp, Homo sapiens
  misc_feature: 750 for SV(C|O) and mtDNA
aaaacccctacgcatttatatagaggagacaagtcgtaacatggtaagtgtactggaaagtgcacttggacgaaccagagtgtagcttaacacaaagcacccaacttacacttaggagat

SEQ ID NO: 70503 - DNA, 120 bp, Homo sapiens; identical to SEQ ID NO: 55659
  misc_feature: 750 for SV(C|O) and mtDNA

SEQ ID NO: 70504 - DNA, 120 bp, Homo sapiens
  misc_feature: 749 for SV(C|O) and mtDNA
tttgaaggctcttggtctgtatttaacctaaatttctataagattattagtataaaaggggagataggtaggagtagcgtggtaagggcgatgagtgtggggaggaatggggtgggtttt

SEQ ID NO: 70505 - DNA, 120 bp, Homo sapiens
  misc_feature: 749 for SV(C|O) and mtDNA
tttcaaaaaggtattagaaaaaccatttcataactttgtcaaagttaaattataggctaaatcctatatatcttaatggcacatgcagcgcaagtaggtctacaagacgctacttcccct

SEQ ID NO: 70506 - DNA, 120 bp, Homo sapiens
  misc_feature: 749 for SV(C|O) and mtDNA
ctatcaccctatagaagaactaatgttagtataagtaacatgaaaacattctcctccgcataagcctgcgtcagattaaaacactgaactgacaattaacagcccaatatctacaatcaa

SEQ ID NO: 70507 - DNA, 120 bp, Homo sapiens
  misc_feature: 749 for SV(C|O) and mtDNA
ttgaaggctcttggtctgtatttaacctaaatttctataagattattagtataaaaggggagataggtaggagtagcgtggtaagggcgatgagtgtggggaggaatggggtgggttttg

SEQ ID NO: 70508 - DNA, 120 bp, Homo sapiens
  misc_feature: 749 for SV(C|O) and mtDNA
ttagccaaaccatttacccaaataaagtataggcgatagaaattgaaacctggcgcaatagatatagtaccgcaagggaaagatgaaaaattataaccaagcataatacagcaaggacta

SEQ ID NO: 70509 - DNA, 120 bp, Homo sapiens
  misc_feature: 749 for SV(C|O) and mtDNA
tgcggcaagtactattgacccagcgatgggggcttcgacatgggctttagggagtcataagtggagtccgtaaagaggtatctttactataaaagctattgtgtaagctagtcatattaa

SEQ ID NO: 70510 - DNA, 120 bp, Homo sapiens
  misc_feature: 749 for SV(C|O) and mtDNA
taaccactcattcatcgacctccccaccccatccaacatctccgcatgatgaaacttcggctcactccttggcgcctgcctgatcctccaaatcaccacaggactattcctagccatgca

SEQ ID NO: 70511 - DNA, 120 bp, Homo sapiens
  misc_feature: 749 for SV(C|O) and mtDNA
tgagtaggggaagggagcctactagggtgtagaataggaagtatgtgcctgcgttcaggcgttctggctggttgcctcatcgggtgatgatagccaaggtggggataagtgtggtttcga

SEQ ID NO: 70512 - DNA, 120 bp, Homo sapiens
  misc_feature: 749 for SV(C|O) and mtDNA
ataatcacttgttccttaaatagggacctgtatgaatggctccacgagggttcagctgtctcttacttttaaccagtgaaattgacctgcccgtgaagaggcgggcatgacacagcaaga

SEQ ID NO: 70513 - DNA, 120 bp, Homo sapiens
  misc_feature: 749 for SV(C|O) and mtDNA
tctatgatggaccatgtaacgaataatgctacagggatgaatattatggagaagtagtctagtttgaagcttagggagagctgggttgtttgggttgtggctcagtgtcagttcgagata

SEQ ID NO: 70514 - DNA, 120 bp, Homo sapiens
  misc_feature: 749 for SV(C|O) and mtDNA
tcgagtctcccttcaccatttccgacggcatctacggctcaacattttttgtagccacaggcttccacggacttcacgtcattattggctcaactttcctcactatctgcttcatccgcc

SEQ ID NO: 70515 - DNA, 120 bp, Homo sapiens
  misc_feature: 749 for SV(C|O) and mtDNA
tccataatattcatccctgtagcattattcgttacatggtccatcatagaattctcactgtgatatataaactcagacccaaacattaatcagttcttcaaatatctactcatcttccta

SEQ ID NO: 70516 - DNA, 120 bp, Homo sapiens
  misc_feature: 749 for SV(C|O) and mtDNA
acctttattatcagtctcttccccacaacaatattcatgtgcctagaccaagaagttattatctcgaactgacactgagccacaacccaaacaacccagctctccctaagcttcaaacta

SEQ ID NO: 70517 - DNA, 120 bp, Homo sapiens
  misc_feature: 749 for SV(C|O) and mtDNA
atccctgtagcattattcgttacatggtccatcatagaattctcactgtgatatataaactcagacccaaacattaatcagttcttcaaatatctactcatcttcctaattaccatacta

SEQ ID NO: 70518 - DNA, 120 bp, Homo sapiens; identical to SEQ ID NO: 51842
  misc_feature: 749 for SV(C|O) and mtDNA

SEQ ID NO: 70519 - DNA, 120 bp, Homo sapiens; identical to SEQ ID NO: 51757
  misc_feature: 749 for SV(C|O) and mtDNA

SEQ ID NO: 70520 - DNA, 120 bp, Homo sapiens; identical to SEQ ID NO: 54196
  misc_feature: 749 for SV(C|O) and mtDNA

SEQ ID NO: 70521 - DNA, 120 bp, Homo sapiens
  misc_feature: 749 for SV(C|O) and mtDNA
tacacgacacgtactacgttgtagctcacttccactatgtcctatcaataggagctgtatttgccatcataggaggcttcattcactgatttcccctattctcaggctacaccctagacc

SEQ ID NO: 70522 - DNA, 120 bp, Homo sapiens
  misc_feature: 749 for SV(C|O) and mtDNA
gttttcttctaagccttctcctatttatgggggtttagtattgattgttagcggtgtggtcgggtgtgttattattctgaattttgggggaggttatatgggtttaatagtttttttaat

SEQ ID NO: 70523 - DNA, 120 bp, Homo sapiens
  misc_feature: 749 for SV(C|O) and mtDNA
gggtgctaatggtggagttaaagactttttctctgatttgtccttggaaaaaggttttcatctccggtttacaagactggtgtattagtttatactacaaggacaggcccatttgagtat

SEQ ID NO: 70524 - DNA, 120 bp, Homo sapiens; identical to SEQ ID NO: 56844
  misc_feature: 749 for SV(C|O) and mtDNA

SEQ ID NO: 70525 - DNA, 120 bp, Homo sapiens
  misc_feature: 749 for SV(C|O) and mtDNA
ggatggggattattgctaggatgaggatggatagtaatagggcaaggacgcctcctagtttgttagggacggatcggagaattgtgtaggcgaataggaaatatcattcgggcttgatgt

SEQ ID NO: 70526 - DNA, 120 bp, Homo sapiens; identical to SEQ ID NO: 57551
  misc_feature: 749 for SV(C|O) and mtDNA

SEQ ID NO: 70527 - DNA, 120 bp, Homo sapiens
  misc_feature: 749 for SV(C|O) and mtDNA
gccccgacgttactcggactaccccgatgcatacaccacatgaaacatcctatcatctgtaggctcattcatttctctaacagcagtaatattaataattttcatgatttgagaagcctt

SEQ ID NO: 70528 - DNA, 120 bp, Homo sapiens
  misc_feature: 749 for SV(C|O) and mtDNA
gatatggggagtagtgtgattgaggtggagtagattaggcgtaggtagaagtagaggttaaggagggtgatggtggctatgatggtggggatgatgaggctattgttttttgtgaattct

SEQ ID NO: 70529 - DNA, 120 bp, Homo sapiens
  misc_feature: 749 for SV(C|O) and mtDNA
agttaaagactttttctctgatttgtccttggaaaaaggttttcatctccggtttacaagactggtgtattagtttatactacaaggacaggcccatttgagtattttgttttcaattag

SEQ ID NO: 70530 - DNA, 120 bp, Homo sapiens
  misc_feature: 749 for SV(C|O) and mtDNA
ctaagaccaatggatagctgttatcctttaaaagttgagaaagccatgttgttagacatgggggcatgagttagcagttcttgtgagctttctcggtaaataaggggtcgtaagcctctg

SEQ ID NO: 70531 - DNA, 120 bp, Homo sapiens; identical to SEQ ID NO: 54772
  misc_feature: 749 for SV(C|O) and mtDNA

SEQ ID NO: 70532 - DNA, 120 bp, Homo sapiens
  misc_feature: 749 for SV(C|O) and mtDNA
aactaaaacccctacgcatttatatagaggagacaagtcgtaacatggtaagtgtactggaaagtgcacttggacgaaccagagtgtagcttaacacaaagcacccaacttacacttagg

SEQ ID NO: 70533 - DNA, 120 bp, Homo sapiens
  misc_feature: 749 for SV(C|O) and mtDNA
actgagggctttgaaggctcttggtctgtatttaacctaaatttctataagattattagtataaaaggggagataggtaggagtagcgtggtaagggcgatgagtgtggggaggaatggg

SEQ ID NO: 70534 - DNA, 120 bp, Homo sapiens
  misc_feature: 749 for SV(C|O) and mtDNA
atatagcctagaatttttcgttcggtaagcattaggaatgccattgcgattagaatgggtacaatgaggagtaggaggttggccatgggtatgttgttaagaagaggaattgaacctctg

SEQ ID NO: 70535 - DNA, 120 bp, Homo sapiens
  misc_feature: 749 for SV(C|O) and mtDNA
cagacatatttcttaggtttgagggggaatgctggagattgtaatgggtatggagacatatcatataagtaatgctagggtgagtggtaggaagttttttcataggaggtgtatgagttg

SEQ ID NO: 70536 - DNA, 120 bp, Homo sapiens; identical to SEQ ID NO: 60309
  misc_feature: 749 for SV(C|O) and mtDNA

SEQ ID NO: 70537 - DNA, 120 bp, Homo sapiens
  misc_feature: 749 for SV(C|O) and mtDNA
aacccctacgcatttatatagaggagacaagtcgtaacatggtaagtgtactggaaagtgcacttggacgaaccagagtgtagcttaacacaaagcacccaacttacacttaggagattt

SEQ ID NO: 70538 - DNA, 120 bp, Homo sapiens; identical to SEQ ID NO: 57655
  misc_feature: 748 for SV(C|O) and mtDNA

SEQ ID NO: 70539 - DNA, 120 bp, Homo sapiens; identical to SEQ ID NO: 52316
  misc_feature: 748 for SV(C|O) and mtDNA

SEQ ID NO: 70540 - DNA, 120 bp, Homo sapiens
  misc_feature: 748 for SV(C|O) and mtDNA
ttctggctggttgcctcatcgggtgatgatagccaaggtggggataagtgtggtttcgaagaagatataaaatatgattagttctgtggctgtgaatgttataattaaggagatttgtag

SEQ ID NO: 70541 - DNA, 120 bp, Homo sapiens
  misc_feature: 748 for SV(C|O) and mtDNA
gagtaggggaagggagcctactagggtgtagaataggaagtatgtgcctgcgttcaggcgttctggctggttgcctcatcgggtgatgatagccaaggtggggataagtgtggtttcgaa

SEQ ID NO: 70542 - DNA, 120 bp, Homo sapiens
  misc_feature: 748 for SV(C|O) and mtDNA
ttagggctaggatgatgattaataagagggatgacataactattagtggtaggttagttgtttgtagggctcatggtaggggtaaaaggagggcaatttctagatcaaataataagaagg

SEQ ID NO: 70543 - DNA, 120 bp, Homo sapiens; identical to SEQ ID NO: 54142
  misc_feature: 748 for SV(C|O) and mtDNA

SEQ ID NO: 70544 - DNA, 120 bp, Homo sapiens
  misc_feature: 748 for SV(C|O) and mtDNA
taaccccactaaaacactcaccaagacctcaacccctgacccccatgcctcaggatactcctcaatagccatcgctgtagtatatccaaagacaaccatcattccccctaaataaattaa

SEQ ID NO: 70545 - DNA, 120 bp, Homo sapiens
  misc_feature: 748 for SV(C|O) and mtDNA
ttaacttccaattaactagttttgacaacattcaaaaaagagtaataaacttcgccttaattttaataatcaacaccctcctagccttactactaataattattacattttgactaccac

SEQ ID NO: 70546 - DNA, 120 bp, Homo sapiens
  misc_feature: 748 for SV(C|O) and mtDNA
tggttgcctcatcgggtgatgatagccaaggtggggataagtgtggtttcgaagaagatataaaatatgattagttctgtggctgtgaatgttataattaaggagatttgtagggagatt

SEQ ID NO: 70547 - DNA, 120 bp, Homo sapiens
  misc_feature: 748 for SV(C|O) and mtDNA
tgagccgtagatgccgtcggaaatggtgaagggagactcgaagtactctgaggcttgtaggagggtaaaatagagacccagtaaaattgtaataagcagtgcttgaattatttggtttcg

SEQ ID NO: 70548 - DNA, 120 bp, Homo sapiens
  misc_feature: 748 for SV(C|O) and mtDNA
catctgctcgggcgtatcatcaactgatgagcaagaaggatataattcctacgccctctcagccgatgaacagttggaataggttgttagcggtaactaagattagtatggtaattagga

SEQ ID NO: 70549 - DNA, 120 bp, Homo sapiens
  misc_feature: 748 for SV(C|O) and mtDNA
atgatggaccatgtaacgaataatgctacagggatgaatattatggagaagtagtctagtttgaagcttagggagagctgggttgtttgggttgtggctcagtgtcagttcgagataata

SEQ ID NO: 70550 - DNA, 120 bp, Homo sapiens; identical to SEQ ID NO: 59306
  misc_feature: 748 for SV(C|O) and mtDNA

SEQ ID NO: 70551 - DNA, 120 bp, Homo sapiens
  misc_feature: 748 for SV(C|O) and mtDNA
atttctaggatagtcagtagaattagaattgtgaagatgataagtgtagagggaaggttaatggttgatattgctagggtggcgcttccaattaggtgcatgagtaggtggcctgcagta

SEQ ID NO: 70552 - DNA, 120 bp, Homo sapiens
  misc_feature: 748 for SV(C|O) and mtDNA
tactacacgacacgtactacgttgtagctcacttccactatgtcctatcaataggagctgtatttgccatcataggaggcttcattcactgatttcccctattctcaggctacaccctag

SEQ ID NO: 70553 - DNA, 120 bp, Homo sapiens
  misc_feature: 748 for SV(C|O) and mtDNA
taattaggaagatgagtagatatttgaagaactgattaatgtttgggtctgagtttatatatcacagtgagaattctatgatggaccatgtaacgaataatgctacagggatgaatatta

SEQ ID NO: 70554 - DNA, 120 bp, Homo sapiens; identical to SEQ ID NO: 55466
  misc_feature: 748 for SV(C|O) and mtDNA

SEQ ID NO: 70555 - DNA, 120 bp, Homo sapiens
  misc_feature: 748 for SV(C|O) and mtDNA
gtagcattattcgttacatggtccatcatagaattctcactgtgatatataaactcagacccaaacattaatcagttcttcaaatatctactcatcttcctaattaccatactaatctta

SEQ ID NO: 70556 - DNA, 120 bp, Homo sapiens
  misc_feature: 748 for SV(C|O) and mtDNA
ctatcaccaggctcggtaggtttgtcgcctctacctataaatcttcccactattttgctacatagacgggtgtgctcttttagctgttcttaggtagctcgtctggtttcgggggtctta

SEQ ID NO: 70557 - DNA, 120 bp, Homo sapiens
  misc_feature: 748 for SV(C|O) and mtDNA
caaatcagagaaaaagtctttaactccaccattagcacccaaagctaagattctaatttaaactattctctgttctttcatggggaagcagatttgggtgccacccaagtattgactcac

SEQ ID NO: 70558 - DNA, 120 bp, Homo sapiens
  misc_feature: 748 for SV(C|O) and mtDNA
cactcattcatcgacctccccaccccatccaacatctccgcatgatgaaacttcggctcactccttggcgcctgcctgatcctccaaatcaccacaggactattcctagccatgcactac

SEQ ID NO: 70559 - DNA, 120 bp, Homo sapiens; identical to SEQ ID NO: 54176
  misc_feature: 748 for SV(C|O) and mtDNA

SEQ ID NO: 70560 - DNA, 120 bp, Homo sapiens
  misc_feature: 748 for SV(C|O) and mtDNA
ccctagggtaacttgttccgttggtcaagttattggatcaattgagtatagtagttcgctttgactggtgaagtcttagcatgtactgctcggaggttgggttctgctccgaggtcgccc

SEQ ID NO: 70561 - DNA, 120 bp, Homo sapiens
  misc_feature: 748 for SV(C|O) and mtDNA
atgccccgacgttactcggactaccccgatgcatacaccacatgaaacatcctatcatctgtaggctcattcatttctctaacagcagtaatattaataattttcatgatttgagaagcc

SEQ ID NO: 70562 - DNA, 120 bp, Homo sapiens
  misc_feature: 748 for SV(C|O) and mtDNA
ggcaggcctcctagggagaggagggtggatggaattaagggtgttagtcatgttagcttgtttcaggtgcgagatagtagtagggtcgtggtgctggagtttaagttgagtagtaggaat

SEQ ID NO: 70563 - DNA, 120 bp, Homo sapiens
  misc_feature: 748 for SV(C|O) and mtDNA
gagggcactggcccccaacaggcatcaccccgctaaatcccctagaagtcccactcctaaacacatccgtattactcgcatcaggagtatcaatcacctgagctcaccatagtctaatag

SEQ ID NO: 70564 - DNA, 120 bp, Homo sapiens
  misc_feature: 748 for SV(C|O) and mtDNA
cttctccataatattcatccctgtagcattattcgttacatggtccatcatagaattctcactgtgatatataaactcagacccaaacattaatcagttcttcaaatatctactcatctt

SEQ ID NO: 70565 - DNA, 120 bp, Homo sapiens; identical to SEQ ID NO: 55682
  misc_feature: 748 for SV(C|O) and mtDNA

SEQ ID NO: 70566 - DNA, 120 bp, Homo sapiens
  misc_feature: 748 for SV(C|O) and mtDNA
ctgcataatgaattaactagaaataactttgcaaggagagccaaagctaagacccccgaaaccagacgagctacctaagaacagctaaaagagcacacccgtctatgtagcaaaatagtg

SEQ ID NO: 70567 - DNA, 120 bp, Homo sapiens
  misc_feature: 748 for SV(C|O) and mtDNA
ctgagggctttgaaggctcttggtctgtatttaacctaaatttctataagattattagtataaaaggggagataggtaggagtagcgtggtaagggcgatgagtgtggggaggaatgggg

SEQ ID NO: 70568 - DNA, 120 bp, Homo sapiens
  misc_feature: 748 for SV(C|O) and mtDNA
aattaattaaccactcattcatcgacctccccaccccatccaacatctccgcatgatgaaacttcggctcactccttggcgcctgcctgatcctccaaatcaccacaggactattcctag

SEQ ID NO: 70569 - DNA, 120 bp, Homo sapiens; identical to SEQ ID NO: 59725
  misc_feature: 748 for SV(C|O) and mtDNA

SEQ ID NO: 70570 - DNA, 120 bp, Homo sapiens; identical to SEQ ID NO: 53074
  misc_feature: 748 for SV(C|O) and mtDNA

SEQ ID NO: 70571 - DNA, 120 bp, Homo sapiens; identical to SEQ ID NO: 55475
  misc_feature: 748 for SV(C|O) and mtDNA

SEQ ID NO: 70572 - DNA, 120 bp, Homo sapiens; identical to SEQ ID NO: 52645
  misc_feature: 748 for SV(C|O) and mtDNA

SEQ ID NO: 70573 - DNA, 120 bp, Homo sapiens
  misc_feature: 748 for SV(C|O) and mtDNA
aaaaaatcccaaacatataactgaactcctcacacccaattggaccaatctatcaccctatagaagaactaatgttagtataagtaacatgaaaacattctcctccgcataagcctgcgt

SEQ ID NO: 70574 - DNA, 120 bp, Homo sapiens
  misc_feature: 748 for SV(C|O) and mtDNA
aagaccaatggatagctgttatcctttaaaagttgagaaagccatgttgttagacatgggggcatgagttagcagttcttgtgagctttctcggtaaataaggggtcgtaagcctctgtt

SEQ ID NO: 70575 - DNA, 120 bp, Homo sapiens; identical to SEQ ID NO: 52563
  misc_feature: 747 for SV(C|O) and mtDNA

SEQ ID NO: 70576 - DNA, 120 bp, Homo sapiens
  misc_feature: 747 for SV(C|O) and mtDNA
tttgtagggagattagtatagagaggtagagtttttttcgtgatagtggttcactggataagtggcgttggcttgccatgattgtgaggggtaggagtcaggtagttagtattaggaggg

SEQ ID NO: 70577 - DNA, 120 bp, Homo sapiens
  misc_feature: 747 for SV(C|O) and mtDNA
ttgtctttggatatactacagcgatggctattgaggagtatcctgaggcatgggggtcaggggttgaggtcttggtgagtgttttagtggggttagcgatggaggtaggattggtgctgt

SEQ ID NO: 70578 - DNA, 120 bp, Homo sapiens
  misc_feature: 747 for SV(C|O) and mtDNA
tatgggcgttgattagtagtagttactggttgaacattgtttgttggtgtatatattgtaattgagattgctcgggggaataggttatgtgattaggagtagggttaggatgagtgggaa

SEQ ID NO: 70579 - DNA, 120 bp, Homo sapiens
  misc_feature: 747 for SV(C|O) and mtDNA
ttattgctaggatgaggatggatagtaatagggcaaggacgcctcctagtttgttagggacggatcggagaattgtgtaggcgaataggaaatatcattcgggcttgatgtggggagggg

SEQ ID NO: 70580 - DNA, 120 bp, Homo sapiens
  misc_feature: 747 for SV(C|O) and mtDNA
ctatgatggaccatgtaacgaataatgctacagggatgaatattatggagaagtagtctagtttgaagcttagggagagctgggttgtttgggttgtggctcagtgtcagttcgagataa

SEQ ID NO: 70581 - DNA, 120 bp, Homo sapiens
  misc_feature: 747 for SV(C|O) and mtDNA
ttaggagggcactggcccccaacaggcatcaccccgctaaatcccctagaagtcccactcctaaacacatccgtattactcgcatcaggagtatcaatcacctgagctcaccatagtcta

SEQ ID NO: 70582 - DNA, 120 bp, Homo sapiens; identical to SEQ ID NO: 57225
  misc_feature: 747 for SV(C|O) and mtDNA

SEQ ID NO: 70583 - DNA, 120 bp, Homo sapiens
  misc_feature: 747 for SV(C|O) and mtDNA
tgttagatatggggagtagtgtgattgaggtggagtagattaggcgtaggtagaagtagaggttaaggagggtgatggtggctatgatggtggggatgatgaggctattgttttttgtga

SEQ ID NO: 70584 - DNA, 120 bp, Homo sapiens
  misc_feature: 747 for SV(C|O) and mtDNA
agctttaatttattaatgcaaacagtacctaacaaacccacaggtcctaaactaccaaacctgcattaaaaatttcggttggggcgacctcggagcagaacccaacctccgagcagtaca

SEQ ID NO: 70585 - DNA, 120 bp, Homo sapiens
  misc_feature: 747 for SV(C|O) and mtDNA
tgtaatattgaacgtaggtgcgataaataataggatgaggcaggaatcaaagacagatactgcgacatagggtgctccggctccagcgtctcgcaatgctatcgcgtgcacaccccccag

SEQ ID NO: 70586 - DNA, 120 bp, Homo sapiens; identical to SEQ ID NO: 51787
  misc_feature: 747 for SV(C|O) and mtDNA

SEQ ID NO: 70587 - DNA, 120 bp, Homo sapiens
  misc_feature: 747 for SV(C|O) and mtDNA
gtaggggaagggagcctactagggtgtagaataggaagtatgtgcctgcgttcaggcgttctggctggttgcctcatcgggtgatgatagccaaggtggggataagtgtggtttcgaaga

SEQ ID NO: 70588 - DNA, 120 bp, Homo sapiens
  misc_feature: 747 for SV(C|O) and mtDNA
tcgtcttgctgtgtcatgcccgcctcttcacgggcaggtcaatttcactggttaaaagtaagagacagctgaaccctcgtggagccattcatacaggtccctatttaaggaacaagtgat

SEQ ID NO: 70589 - DNA, 120 bp, Homo sapiens
  misc_feature: 747 for SV(C|O) and mtDNA
tcgtactacacgacacgtactacgttgtagctcacttccactatgtcctatcaataggagctgtatttgccatcataggaggcttcattcactgatttcccctattctcaggctacaccc

SEQ ID NO: 70590 - DNA, 120 bp, Homo sapiens; identical to SEQ ID NO: 53685
  misc_feature: 747 for SV(C|O) and mtDNA

SEQ ID NO: 70591 - DNA, 120 bp, Homo sapiens; identical to SEQ ID NO: 54253
  misc_feature: 747 for SV(C|O) and mtDNA

SEQ ID NO: 70592 - DNA, 120 bp, Homo sapiens
  misc_feature: 747 for SV(C|O) and mtDNA
atgttttcatgttacttatactaacattagttcttctatagggtgatagattggtccaattgggtgtgaggagttcagttatatgtttgggattttttaggtagtgggtgttgagcttga

SEQ ID NO: 70593 - DNA, 120 bp, Homo sapiens
  misc_feature: 747 for SV(C|O) and mtDNA
tatcaccctatagaagaactaatgttagtataagtaacatgaaaacattctcctccgcataagcctgcgtcagattaaaacactgaactgacaattaacagcccaatatctacaatcaac

SEQ ID NO: 70594 - DNA, 120 bp, Homo sapiens
  misc_feature: 747 for SV(C|O) and mtDNA
taagcagtgcttgaattatttggtttcggttgttttctattagactatggtgagctcaggtgattgatactcctgatgcgagtaatacggatgtgtttaggagtgggacttctaggggat

SEQ ID NO: 70595 - DNA, 120 bp, Homo sapiens
  misc_feature: 747 for SV(C|O) and mtDNA
gtgctatgtacggtaaatggctttatgtactatgtgctgttaagggtgagtaggtttgttggtatcctagtgggtgaggggtggctttggagttgcagttgatgtgtgatagttgagggt

SEQ ID NO: 70596 - DNA, 120 bp, Homo sapiens
  misc_feature: 747 for SV(C|O) and mtDNA
acatcaaaaccccctccccatgcttacaagcaagtacagcaatcaaccctcaactatcacacatcaactgcaactccaaagccacccctcacccactaggataccaacaaacctactcac

SEQ ID NO: 70597 - DNA, 120 bp, Homo sapiens; identical to SEQ ID NO: 52537
  misc_feature: 747 for SV(C|O) and mtDNA

SEQ ID NO: 70598 - DNA, 120 bp, Homo sapiens; identical to SEQ ID NO: 52575
  misc_feature: 747 for SV(C|O) and mtDNA

SEQ ID NO: 70599 - DNA, 120 bp, Homo sapiens
  misc_feature: 747 for SV(C|O) and mtDNA
ggtttggtctagggtgtagcctgagaataggggaaatcagtgaatgaagcctcctatgatggcaaatacagctcctattgataggacatagtggaagtgagctacaacgtagtacgtgtc

SEQ ID NO: 70600 - DNA, 120 bp, Homo sapiens
  misc_feature: 747 for SV(C|O) and mtDNA
ccaaagaggaacagctctttggacactaggaaaaaaccttgtagagagagtaaaaaatttaacacccatagtaggcctaaaagcagccaccaattaagaaagcgttcaagctcaacaccc

SEQ ID NO: 70601 - DNA, 120 bp, Homo sapiens; identical to SEQ ID NO: 57497
  misc_feature: 747 for SV(C|O) and mtDNA

SEQ ID NO: 70602 - DNA, 120 bp, Homo sapiens
  misc_feature: 747 for SV(C|O) and mtDNA
gacctccccaccccatccaacatctccgcatgatgaaacttcggctcactccttggcgcctgcctgatcctccaaatcaccacaggactattcctagccatgcactactcaccagacgcc

SEQ ID NO: 70603 - DNA, 120 bp, Homo sapiens; identical to SEQ ID NO: 52140
  misc_feature: 747 for SV(C|O) and mtDNA

SEQ ID NO: 70604 - DNA, 120 bp, Homo sapiens
  misc_feature: 747 for SV(C|O) and mtDNA
attcgttacatggtccatcatagaattctcactgtgatatataaactcagacccaaacattaatcagttcttcaaatatctactcatcttcctaattaccatactaatcttagttaccgc

SEQ ID NO: 70605 - DNA, 120 bp, Homo sapiens
  misc_feature: 747 for SV(C|O) and mtDNA
caatggatagctgttatcctttaaaagttgagaaagccatgttgttagacatgggggcatgagttagcagttcttgtgagctttctcggtaaataaggggtcgtaagcctctgttgtcag

SEQ ID NO: 70606 - DNA, 120 bp, Homo sapiens; identical to SEQ ID NO: 51902
  misc_feature: 747 for SV(C|O) and mtDNA

SEQ ID NO: 70607 - DNA, 120 bp, Homo sapiens; identical to SEQ ID NO: 53905
  misc_feature: 747 for SV(C|O) and mtDNA

SEQ ID NO: 70608 - DNA, 120 bp, Homo sapiens
  misc_feature: 747 for SV(C|O) and mtDNA
ccctgtagcattattcgttacatggtccatcatagaattctcactgtgatatataaactcagacccaaacattaatcagttcttcaaatatctactcatcttcctaattaccatactaat

SEQ ID NO: 70609 - DNA, 120 bp, Homo sapiens
  misc_feature: 747 for SV(C|O) and mtDNA
cacttctaggaatactagtataccgctcacacctcatatcctccctactatgcctagaaggaataatactatcactgttcattatagctactctcataaccctcaacacccactccctct

SEQ ID NO: 70610 - DNA, 120 bp, Homo sapiens; identical to SEQ ID NO: 60308
  misc_feature: 747 for SV(C|O) and mtDNA

SEQ ID NO: 70611 - DNA, 120 bp, Homo sapiens
  misc_feature: 747 for SV(C|O) and mtDNA
aacctgatctcttatactagtatccttaatcatttttattgccacaactaacctcctcggactcctgcctcactcatttacaccaaccacccaactatctataaacctagccatggccat

SEQ ID NO: 70612 - DNA, 120 bp, Homo sapiens
  misc_feature: 747 for SV(C|O) and mtDNA
aaactgtcattttatttttacgttgttagatatggggagtagtgtgattgaggtggagtagattaggcgtaggtagaagtagaggttaaggagggtgatggtggctatgatggtggggat

SEQ ID NO: 70613 - DNA, 120 bp, Homo sapiens; identical to SEQ ID NO: 55415
  misc_feature: 747 for SV(C|O) and mtDNA

SEQ ID NO: 70614 - DNA, 120 bp, Homo sapiens
  misc_feature: 747 for SV(C|O) and mtDNA
agttaccctagggataacagcgcaatcctattctagagtccatatcaacaatagggtttacgacctcgatgttggatcaggacatcccgatggtgcagccgctattaaaggttcgtttgt

SEQ ID NO: 70615 - DNA, 120 bp, Homo sapiens; identical to SEQ ID NO: 60429
  misc_feature: 746 for SV(C|O) and mtDNA

SEQ ID NO: 70616 - DNA, 120 bp, Homo sapiens
  misc_feature: 746 for SV(C|O) and mtDNA
caaaggacatttaactaaaacccctacgcatttatatagaggagacaagtcgtaacatggtaagtgtactggaaagtgcacttggacgaaccagagtgtagcttaacacaaagcacccaa

SEQ ID NO: 70617 - DNA, 120 bp, Homo sapiens
  misc_feature: 746 for SV(C|O) and mtDNA
ttgggtgctaatggtggagttaaagactttttctctgatttgtccttggaaaaaggttttcatctccggtttacaagactggtgtattagtttatactacaaggacaggcccatttgagt

SEQ ID NO: 70618 - DNA, 120 bp, Homo sapiens
  misc_feature: 746 for SV(C|O) and mtDNA
tattgaacgtaggtgcgataaataataggatgaggcaggaatcaaagacagatactgcgacatagggtgctccggctccagcgtctcgcaatgctatcgcgtgcacaccccccagacgaa

SEQ ID NO: 70619 - DNA, 120 bp, Homo sapiens
  misc_feature: 746 for SV(C|O) and mtDNA
gtcaagtatttatggtaccgtacaatattcatggtggctggcagtaatgtacgaattacatagcggttgttgatgggtgagtcaatacttgggtggcacccaaatctgcttccccatgaa

SEQ ID NO: 70620 - DNA, 120 bp, Homo sapiens
  misc_feature: 746 for SV(C|O) and mtDNA
ttcatatcattggtcgtggttgtagtccgtgcgagaataatgatgtatgctttgtttctgttgagtgtgggtttagtaatggggtttgtggggttttcttctaagccttctcctatttat

SEQ ID NO: 70621 - DNA, 120 bp, Homo sapiens
  misc_feature: 746 for SV(C|O) and mtDNA
ctaccactcaccctagcattacttatatgatatgtctccatacccattacaatctccagcattccccctcaaacctaagaaatatgtctgataaaagagttactttgatagagtaaataa

SEQ ID NO: 70622 - DNA, 120 bp, Homo sapiens
  misc_feature: 746 for SV(C|O) and mtDNA
ttattcgttacatggtccatcatagaattctcactgtgatatataaactcagacccaaacattaatcagttcttcaaatatctactcatcttcctaattaccatactaatcttagttacc

SEQ ID NO: 70623 - DNA, 120 bp, Homo sapiens
  misc_feature: 746 for SV(C|O) and mtDNA
ttatgggcgttgattagtagtagttactggttgaacattgtttgttggtgtatatattgtaattgagattgctcgggggaataggttatgtgattaggagtagggttaggatgagtggga

SEQ ID NO: 70624 - DNA, 120 bp, Homo sapiens
  misc_feature: 746 for SV(C|O) and mtDNA
tccctgtagcattattcgttacatggtccatcatagaattctcactgtgatatataaactcagacccaaacattaatcagttcttcaaatatctactcatcttcctaattaccatactaa

SEQ ID NO: 70625 - DNA, 120 bp, Homo sapiens
  misc_feature: 746 for SV(C|O) and mtDNA
cttcctaccactcaccctagcattacttatatgatatgtctccatacccattacaatctccagcattccccctcaaacctaagaaatatgtctgataaaagagttactttgatagagtaa

SEQ ID NO: 70626 - DNA, 120 bp, Homo sapiens; identical to SEQ ID NO: 58850
  misc_feature: 746 for SV(C|O) and mtDNA

SEQ ID NO: 70627 - DNA, 120 bp, Homo sapiens
  misc_feature: 746 for SV(C|O) and mtDNA
tgtcctatcaataggagctgtatttgccatcataggaggcttcattcactgatttcccctattctcaggctacaccctagaccaaacctacgccaaaatccatttcactatcatattcat

SEQ ID NO: 70628 - DNA, 120 bp, Homo sapiens
  misc_feature: 746 for SV(C|O) and mtDNA
caaagaggaacagctctttggacactaggaaaaaaccttgtagagagagtaaaaaatttaacacccatagtaggcctaaaagcagccaccaattaagaaagcgttcaagctcaacaccca

SEQ ID NO: 70629 - DNA, 120 bp, Homo sapiens
  misc_feature: 746 for SV(C|O) and mtDNA
agttcttcaaatatctactcatcttcctaattaccatactaatcttagttaccgctaacaacctattccaactgttcatcggctgagagggcgtaggaattatatccttcttgctcatca

SEQ ID NO: 70630 - DNA, 120 bp, Homo sapiens
  misc_feature: 746 for SV(C|O) and mtDNA
tgaacgtaggtgcgataaataataggatgaggcaggaatcaaagacagatactgcgacatagggtgctccggctccagcgtctcgcaatgctatcgcgtgcacaccccccagacgaaaat

SEQ ID NO: 70631 - DNA, 120 bp, Homo sapiens
  misc_feature: 746 for SV(C|O) and mtDNA
tctggctggttgcctcatcgggtgatgatagccaaggtggggataagtgtggtttcgaagaagatataaaatatgattagttctgtggctgtgaatgttataattaaggagatttgtagg

SEQ ID NO: 70632 - DNA, 120 bp, Homo sapiens; identical to SEQ ID NO: 58555
  misc_feature: 746 for SV(C|O) and mtDNA

SEQ ID NO: 70633 - DNA, 120 bp, Homo sapiens
  misc_feature: 746 for SV(C|O) and mtDNA
tcaaactgtcattttatttttacgttgttagatatggggagtagtgtgattgaggtggagtagattaggcgtaggtagaagtagaggttaaggagggtgatggtggctatgatggtgggg

SEQ ID NO: 70634 - DNA, 120 bp, Homo sapiens
  misc_feature: 746 for SV(C|O) and mtDNA
cctaccactcaccctagcattacttatatgatatgtctccatacccattacaatctccagcattccccctcaaacctaagaaatatgtctgataaaagagttactttgatagagtaaata

SEQ ID NO: 70635 - DNA, 120 bp, Homo sapiens
  misc_feature: 746 for SV(C|O) and mtDNA
attgtcgcatccacctttattatcagtctcttccccacaacaatattcatgtgcctagaccaagaagttattatctcgaactgacactgagccacaacccaaacaacccagctctcccta

SEQ ID NO: 70636 - DNA, 120 bp, Homo sapiens
  misc_feature: 746 for SV(C|O) and mtDNA
tagaagaaaaccccacaaaccccattactaaacccacactcaacagaaacaaagcatacatcattattctcgcacggactacaaccacgaccaatgatatgaaaaaccatcgttgtattt

SEQ ID NO: 70637 - DNA, 120 bp, Homo sapiens
  misc_feature: 746 for SV(C|O) and mtDNA
ggacatttaactaaaacccctacgcatttatatagaggagacaagtcgtaacatggtaagtgtactggaaagtgcacttggacgaaccagagtgtagcttaacacaaagcacccaactta

SEQ ID NO: 70638 - DNA, 120 bp, Homo sapiens
  misc_feature: 746 for SV(C|O) and mtDNA
taaaaaatttaacacccatagtaggcctaaaagcagccaccaattaagaaagcgttcaagctcaacacccactacctaaaaaatcccaaacatataactgaactcctcacacccaattgg

SEQ ID NO: 70639 - DNA, 120 bp, Homo sapiens
  misc_feature: 746 for SV(C|O) and mtDNA
gtgctaatggtggagttaaagactttttctctgatttgtccttggaaaaaggttttcatctccggtttacaagactggtgtattagtttatactacaaggacaggcccatttgagtattt

SEQ ID NO: 70640 - DNA, 120 bp, Homo sapiens
  misc_feature: 746 for SV(C|O) and mtDNA
gtctttggatatactacagcgatggctattgaggagtatcctgaggcatgggggtcaggggttgaggtcttggtgagtgttttagtggggttagcgatggaggtaggattggtgctgtgg

SEQ ID NO: 70641 - DNA, 120 bp, Homo sapiens
  misc_feature: 746 for SV(C|O) and mtDNA
gtacgaaaggacaagagaaataaggcctacttcacaaagcgccttcccccgtaaatgatatcatctcaacttagtattatacccacacccacccaagaacagggtttgttaagatggcag

SEQ ID NO: 70642 - DNA, 120 bp, Homo sapiens
  misc_feature: 746 for SV(C|O) and mtDNA
acaaagacattggaacactatacctattattcggcgcatgagctggagtcctaggcacagctctaagcctccttattcgagccgagctgggccagccaggcaaccttctaggtaacgacc

SEQ ID NO: 70643 - DNA, 120 bp, Homo sapiens
  misc_feature: 746 for SV(C|O) and mtDNA
cagcagtaatattaataattttcatgatttgagaagccttcgcttcgaagcgaaaagtcctaatagtagaagaaccctccataaacctggagtgactatatggatgccccccaccctacc

SEQ ID NO: 70644 - DNA, 120 bp, Homo sapiens
  misc_feature: 746 for SV(C|O) and mtDNA
gggaagcagatttgggtgccacccaagtattgactcacccatcaacaaccgctatgtaattcgtacattactgccagccaccatgaatattgtacggtaccataaatacttgaccacctg

SEQ ID NO: 70645 - DNA, 120 bp, Homo sapiens
  misc_feature: 746 for SV(C|O) and mtDNA
ggctggttgcctcatcgggtgatgatagccaaggtggggataagtgtggtttcgaagaagatataaaatatgattagttctgtggctgtgaatgttataattaaggagatttgtagggag

SEQ ID NO: 70646 - DNA, 120 bp, Homo sapiens; identical to SEQ ID NO: 51955
  misc_feature: 746 for SV(C|O) and mtDNA

SEQ ID NO: 70647 - DNA, 120 bp, Homo sapiens
  misc_feature: 746 for SV(C|O) and mtDNA
aatcttagctttgggtgctaatggtggagttaaagactttttctctgatttgtccttggaaaaaggttttcatctccggtttacaagactggtgtattagtttatactacaaggacaggc

SEQ ID NO: 70648 - DNA, 120 bp, Homo sapiens
  misc_feature: 746 for SV(C|O) and mtDNA
gcacggactacaaccacgaccaatgatatgaaaaaccatcgttgtatttcaactacaagaacaccaatgaccccaatacgcaaaattaaccccctaataaaattaattaaccactcattc

SEQ ID NO: 70649 - DNA, 120 bp, Homo sapiens; identical to SEQ ID NO: 55202
  misc_feature: 746 for SV(C|O) and mtDNA

SEQ ID NO: 70650 - DNA, 120 bp, Homo sapiens
  misc_feature: 746 for SV(C|O) and mtDNA
cataattaaactttacttcctctctttcttcttcccactcatcctaaccctactcctaatcacataacctattcccccgagcaatctcaattacaatatatacaccaacaaacaatgttc

SEQ ID NO: 70651 - DNA, 120 bp, Homo sapiens; identical to SEQ ID NO: 57982
  misc_feature: 746 for SV(C|O) and mtDNA

SEQ ID NO: 70652 - DNA, 120 bp, Homo sapiens; identical to SEQ ID NO: 57650
  misc_feature: 746 for SV(C|O) and mtDNA

SEQ ID NO: 70653 - DNA, 120 bp, Homo sapiens
  misc_feature: 746 for SV(C|O) and mtDNA
aactgtcattttatttttacgttgttagatatggggagtagtgtgattgaggtggagtagattaggcgtaggtagaagtagaggttaaggagggtgatggtggctatgatggtggggatg

SEQ ID NO: 70654 - DNA, 120 bp, Homo sapiens; identical to SEQ ID NO: 56424
  misc_feature: 746 for SV(C|O) and mtDNA

SEQ ID NO: 70655 - DNA, 120 bp, Homo sapiens; identical to SEQ ID NO: 55658
  misc_feature: 746 for SV(C|O) and mtDNA

SEQ ID NO: 70656 - DNA, 120 bp, Homo sapiens
  misc_feature: 746 for SV(C|O) and mtDNA
agagtagctataatgaacagtgatagtattattccttctaggcatagtagggaggatatgaggtgtgagcggtatactagtattcctagaagtgagatggtaaatgctagtataatattt

SEQ ID NO: 70657 - DNA, 120 bp, Homo sapiens; identical to SEQ ID NO: 55139
  misc_feature: 746 for SV(C|O) and mtDNA

SEQ ID NO: 70658 - DNA, 120 bp, Homo sapiens
  misc_feature: 746 for SV(C|O) and mtDNA
aaacccctacgcatttatatagaggagacaagtcgtaacatggtaagtgtactggaaagtgcacttggacgaaccagagtgtagcttaacacaaagcacccaacttacacttaggagatt

SEQ ID NO: 70659 - DNA, 120 bp, Homo sapiens
  misc_feature: 746 for SV(C|O) and mtDNA
aataaaattaattaaccactcattcatcgacctccccaccccatccaacatctccgcatgatgaaacttcggctcactccttggcgcctgcctgatcctccaaatcaccacaggactatt

SEQ ID NO: 70660 - DNA, 120 bp, Homo sapiens
  misc_feature: 745 for SV(C|O) and mtDNA
ttttcgttcggtaagcattaggaatgccattgcgattagaatgggtacaatgaggagtaggaggttggccatgggtatgttgttaagaagaggaattgaacctctgactgtaaagtttta

SEQ ID NO: 70661 - DNA, 120 bp, Homo sapiens; identical to SEQ ID NO: 62415
  misc_feature: 745 for SV(C|O) and mtDNA

SEQ ID NO: 70662 - DNA, 120 bp, Homo sapiens; identical to SEQ ID NO: 52621
  misc_feature: 745 for SV(C|O) and mtDNA

SEQ ID NO: 70663 - DNA, 120 bp, Homo sapiens
  misc_feature: 745 for SV(C|O) and mtDNA
cacgacacgtactacgttgtagctcacttccactatgtcctatcaataggagctgtatttgccatcataggaggcttcattcactgatttcccctattctcaggctacaccctagaccaa

SEQ ID NO: 70664 - DNA, 120 bp, Homo sapiens
  misc_feature: 745 for SV(C|O) and mtDNA
taggggaagggagcctactagggtgtagaataggaagtatgtgcctgcgttcaggcgttctggctggttgcctcatcgggtgatgatagccaaggtggggataagtgtggtttcgaagaa

SEQ ID NO: 70665 - DNA, 120 bp, Homo sapiens
  misc_feature: 745 for SV(C|O) and mtDNA
ttctatttccccctctattgatccccacctccaaatatctcatcaacaaccgactaatcaccacccaacaatgactaatcaaactaacctcaaaacaaatgataaccatacacaacacta

SEQ ID NO: 70666 - DNA, 120 bp, Homo sapiens
  misc_feature: 745 for SV(C|O) and mtDNA
gggcaggcctcctagggagaggagggtggatggaattaagggtgttagtcatgttagcttgtttcaggtgcgagatagtagtagggtcgtggtgctggagtttaagttgagtagtaggaa

SEQ ID NO: 70667 - DNA, 120 bp, Homo sapiens; identical to SEQ ID NO: 58703
  misc_feature: 745 for SV(C|O) and mtDNA

SEQ ID NO: 70668 - DNA, 120 bp, Homo sapiens
  misc_feature: 745 for SV(C|O) and mtDNA
taggagggcactggcccccaacaggcatcaccccgctaaatcccctagaagtcccactcctaaacacatccgtattactcgcatcaggagtatcaatcacctgagctcaccatagtctaa

SEQ ID NO: 70669 - DNA, 120 bp, Homo sapiens; identical to SEQ ID NO: 54725
  misc_feature: 745 for SV(C|O) and mtDNA

SEQ ID NO: 70670 - DNA, 120 bp, Homo sapiens
  misc_feature: 745 for SV(C|O) and mtDNA
tggtcaagtatttatggtaccgtacaatattcatggtggctggcagtaatgtacgaattacatagcggttgttgatgggtgagtcaatacttgggtggcacccaaatctgcttccccatg

SEQ ID NO: 70671 - DNA, 120 bp, Homo sapiens; identical to SEQ ID NO: 53197
  misc_feature: 745 for SV(C|O) and mtDNA

SEQ ID NO: 70672 - DNA, 120 bp, Homo sapiens; identical to SEQ ID NO: 54679
  misc_feature: 745 for SV(C|O) and mtDNA

SEQ ID NO: 70673 - DNA, 120 bp, Homo sapiens
  misc_feature: 745 for SV(C|O) and mtDNA
cacatcaaaaccccctccccatgcttacaagcaagtacagcaatcaaccctcaactatcacacatcaactgcaactccaaagccacccctcacccactaggataccaacaaacctactca

SEQ ID NO: 70674 - DNA, 120 bp, Homo sapiens
  misc_feature: 745 for SV(C|O) and mtDNA
tagcatttaccatctcacttctaggaatactagtataccgctcacacctcatatcctccctactatgcctagaaggaataatactatcactgttcattatagctactctcataaccctca

SEQ ID NO: 70675 - DNA, 120 bp, Homo sapiens
  misc_feature: 745 for SV(C|O) and mtDNA
gttgttagacatgggggcatgagttagcagttcttgtgagctttctcggtaaataaggggtcgtaagcctctgttgtcagattcacaatctgatgttttggttaaactatatttacaaga

SEQ ID NO: 70676 - DNA, 120 bp, Homo sapiens
  misc_feature: 745 for SV(C|O) and mtDNA
ctgctcgggcgtatcatcaactgatgagcaagaaggatataattcctacgccctctcagccgatgaacagttggaataggttgttagcggtaactaagattagtatggtaattaggaaga

SEQ ID NO: 70677 - DNA, 120 bp, Homo sapiens
  misc_feature: 745 for SV(C|O) and mtDNA
gtaatattgaacgtaggtgcgataaataataggatgaggcaggaatcaaagacagatactgcgacatagggtgctccggctccagcgtctcgcaatgctatcgcgtgcacaccccccaga

SEQ ID NO: 70678 - DNA, 120 bp, Homo sapiens
  misc_feature: 745 for SV(C|O) and mtDNA
tcccttcaccatttccgacggcatctacggctcaacattttttgtagccacaggcttccacggacttcacgtcattattggctcaactttcctcactatctgcttcatccgccaactaat

SEQ ID NO: 70679 - DNA, 120 bp, Homo sapiens; identical to SEQ ID NO: 56101
  misc_feature: 745 for SV(C|O) and mtDNA

SEQ ID NO: 70680 - DNA, 120 bp, Homo sapiens
  misc_feature: 745 for SV(C|O) and mtDNA
tcagacatatttcttaggtttgagggggaatgctggagattgtaatgggtatggagacatatcatataagtaatgctagggtgagtggtaggaagttttttcataggaggtgtatgagtt

SEQ ID NO: 70681 - DNA, 120 bp, Homo sapiens
  misc_feature: 745 for SV(C|O) and mtDNA
tatttggtttcggttgttttctattagactatggtgagctcaggtgattgatactcctgatgcgagtaatacggatgtgtttaggagtgggacttctaggggatttagcggggtgatgcc

SEQ ID NO: 70682 - DNA, 120 bp, Homo sapiens
  misc_feature: 745 for SV(C|O) and mtDNA
cccttcaccatttccgacggcatctacggctcaacattttttgtagccacaggcttccacggacttcacgtcattattggctcaactttcctcactatctgcttcatccgccaactaata

SEQ ID NO: 70683 - DNA, 120 bp, Homo sapiens
  misc_feature: 745 for SV(C|O) and mtDNA
ggagggcactggcccccaacaggcatcaccccgctaaatcccctagaagtcccactcctaaacacatccgtattactcgcatcaggagtatcaatcacctgagctcaccatagtctaata

SEQ ID NO: 70684 - DNA, 120 bp, Homo sapiens; identical to SEQ ID NO: 56666
  misc_feature: 745 for SV(C|O) and mtDNA

SEQ ID NO: 70685 - DNA, 120 bp, Homo sapiens; identical to SEQ ID NO: 54598
  misc_feature: 745 for SV(C|O) and mtDNA

SEQ ID NO: 70686 - DNA, 120 bp, Homo sapiens; identical to SEQ ID NO: 53482
  misc_feature: 745 for SV(C|O) and mtDNA

SEQ ID NO: 70687 - DNA, 120 bp, Homo sapiens; identical to SEQ ID NO: 55291
  misc_feature: 745 for SV(C|O) and mtDNA

SEQ ID NO: 70688 - DNA, 120 bp, Homo sapiens
  misc_feature: 745 for SV(C|O) and mtDNA
taatattgaacgtaggtgcgataaataataggatgaggcaggaatcaaagacagatactgcgacatagggtgctccggctccagcgtctcgcaatgctatcgcgtgcacaccccccagac

SEQ ID NO: 70689 - DNA, 120 bp, Homo sapiens; identical to SEQ ID NO: 53091
  misc_feature: 745 for SV(C|O) and mtDNA

SEQ ID NO: 70690 - DNA, 120 bp, Homo sapiens
  misc_feature: 745 for SV(C|O) and mtDNA
gtctcccttcaccatttccgacggcatctacggctcaacattttttgtagccacaggcttccacggacttcacgtcattattggctcaactttcctcactatctgcttcatccgccaact

SEQ ID NO: 70691 - DNA, 120 bp, Homo sapiens
  misc_feature: 745 for SV(C|O) and mtDNA
atgactccctaaagcccatgtcgaagcccccatcgctgggtcaatagtacttgccgcagtactcttaaaactaggcggctatggtataatacgcctcacactcattctcaaccccctgac

SEQ ID NO: 70692 - DNA, 120 bp, Homo sapiens
  misc_feature: 745 for SV(C|O) and mtDNA
aatattcatccctgtagcattattcgttacatggtccatcatagaattctcactgtgatatataaactcagacccaaacattaatcagttcttcaaatatctactcatcttcctaattac

SEQ ID NO: 70693 - DNA, 120 bp, Homo sapiens
  misc_feature: 745 for SV(C|O) and mtDNA
ggtgctaatggtggagttaaagactttttctctgatttgtccttggaaaaaggttttcatctccggtttacaagactggtgtattagtttatactacaaggacaggcccatttgagtatt

SEQ ID NO: 70694 - DNA, 120 bp, Homo sapiens
  misc_feature: 745 for SV(C|O) and mtDNA
catcaaaaccccctccccatgcttacaagcaagtacagcaatcaaccctcaactatcacacatcaactgcaactccaaagccacccctcacccactaggataccaacaaacctactcacc

SEQ ID NO: 70695 - DNA, 120 bp, Homo sapiens
  misc_feature: 745 for SV(C|O) and mtDNA
ctaacagcagtaatattaataattttcatgatttgagaagccttcgcttcgaagcgaaaagtcctaatagtagaagaaccctccataaacctggagtgactatatggatgccccccaccc

SEQ ID NO: 70696 - DNA, 120 bp, Homo sapiens
  misc_feature: 745 for SV(C|O) and mtDNA
cctagggtaacttgttccgttggtcaagttattggatcaattgagtatagtagttcgctttgactggtgaagtcttagcatgtactgctcggaggttgggttctgctccgaggtcgcccc

SEQ ID NO: 70697 - DNA, 120 bp, Homo sapiens; identical to SEQ ID NO: 56321
  misc_feature: 745 for SV(C|O) and mtDNA

SEQ ID NO: 70698 - DNA, 120 bp, Homo sapiens
  misc_feature: 745 for SV(C|O) and mtDNA
aacaatattcatgtgcctagaccaagaagttattatctcgaactgacactgagccacaacccaaacaacccagctctccctaagcttcaaactagactacttctccataatattcatccc

SEQ ID NO: 70699 - DNA, 120 bp, Homo sapiens
  misc_feature: 745 for SV(C|O) and mtDNA
ggcataattaaactttacttcctctctttcttcttcccactcatcctaaccctactcctaatcacataacctattcccccgagcaatctcaattacaatatatacaccaacaaacaatgt

SEQ ID NO: 70700 - DNA, 120 bp, Homo sapiens
  misc_feature: 745 for SV(C|O) and mtDNA
ggatgccccccaccctaccacacattcgaagaacccgtatacataaaatctagacaaaaaaggaaggaatcgaaccccccaaagctggtttcaagccaaccccatggcctccatgacttt

SEQ ID NO: 70701 - DNA, 120 bp, Homo sapiens
  misc_feature: 745 for SV(C|O) and mtDNA
ggaagctgaataatttatgaaggagaggggtcagggttgattcgggaggatcctattggtgcgggggctttgtatgattatgggcgttgattagtagtagttactggttgaacattgttt

SEQ ID NO: 70702 - DNA, 120 bp, Homo sapiens; identical to SEQ ID NO: 51814
  misc_feature: 745 for SV(C|O) and mtDNA

SEQ ID NO: 70703 - DNA, 120 bp, Homo sapiens
  misc_feature: 745 for SV(C|O) and mtDNA
gcctgtttaccaaaaacatcacctctagcatcaccagtattagaggcaccgcctgcccagtgacacatgtttaacggccgcggtaccctaaccgtgcaaaggtagcataatcacttgttc

SEQ ID NO: 70704 - DNA, 120 bp, Homo sapiens
  misc_feature: 745 for SV(C|O) and mtDNA
gatgctaataattaggctgtgggtggttgtgttgattcaaattatgtgttttttggaaagtcatgtcagtggtagtaatataattgttgggacgattagttttagcattggagtaggttt

SEQ ID NO: 70705 - DNA, 120 bp, Homo sapiens; identical to SEQ ID NO: 57117
  misc_feature: 745 for SV(C|O) and mtDNA

SEQ ID NO: 70706 - DNA, 120 bp, Homo sapiens; identical to SEQ ID NO: 55554
  misc_feature: 745 for SV(C|O) and mtDNA

SEQ ID NO: 70707 - DNA, 120 bp, Homo sapiens
  misc_feature: 745 for SV(C|O) and mtDNA
ccgtatggcccaccataattacccccatactccttacactattcctcatcacccaactaaaaatattaaacacaaactaccacctacctccctcaccaaagcccataaaaataaaaaatt

SEQ ID NO: 70708 - DNA, 120 bp, Homo sapiens
  misc_feature: 745 for SV(C|O) and mtDNA
agggctttgaaggctcttggtctgtatttaacctaaatttctataagattattagtataaaaggggagataggtaggagtagcgtggtaagggcgatgagtgtggggaggaatggggtgg

SEQ ID NO: 70709 - DNA, 120 bp, Homo sapiens
  misc_feature: 745 for SV(C|O) and mtDNA
aggcataattaaactttacttcctctctttcttcttcccactcatcctaaccctactcctaatcacataacctattcccccgagcaatctcaattacaatatatacaccaacaaacaatg

SEQ ID NO: 70710 - DNA, 120 bp, Homo sapiens
  misc_feature: 745 for SV(C|O) and mtDNA
catccctgtagcattattcgttacatggtccatcatagaattctcactgtgatatataaactcagacccaaacattaatcagttcttcaaatatctactcatcttcctaattaccatact

SEQ ID NO: 70711 - DNA, 120 bp, Homo sapiens; identical to SEQ ID NO: 53718
  misc_feature: 745 for SV(C|O) and mtDNA

SEQ ID NO: 70712 - DNA, 120 bp, Homo sapiens; identical to SEQ ID NO: 56457
  misc_feature: 745 for SV(C|O) and mtDNA

SEQ ID NO: 70713 - DNA, 120 bp, Homo sapiens
  misc_feature: 745 for SV(C|O) and mtDNA
atttaactaaaacccctacgcatttatatagaggagacaagtcgtaacatggtaagtgtactggaaagtgcacttggacgaaccagagtgtagcttaacacaaagcacccaacttacact

SEQ ID NO: 70714 - DNA, 120 bp, Homo sapiens; identical to SEQ ID NO: 60178
  misc_feature: 745 for SV(C|O) and mtDNA

SEQ ID NO: 70715 - DNA, 120 bp, Homo sapiens
  misc_feature: 745 for SV(C|O) and mtDNA
acaatattcatgtgcctagaccaagaagttattatctcgaactgacactgagccacaacccaaacaacccagctctccctaagcttcaaactagactacttctccataatattcatccct

SEQ ID NO: 70716 - DNA, 120 bp, Homo sapiens
  misc_feature: 745 for SV(C|O) and mtDNA
aaaattaattaaccactcattcatcgacctccccaccccatccaacatctccgcatgatgaaacttcggctcactccttggcgcctgcctgatcctccaaatcaccacaggactattcct

SEQ ID NO: 70717 - DNA, 120 bp, Homo sapiens; identical to SEQ ID NO: 55309
  misc_feature: 745 for SV(C|O) and mtDNA

SEQ ID NO: 70718 - DNA, 120 bp, Homo sapiens
  misc_feature: 744 for SV(C|O) and mtDNA
ttgaacgtaggtgcgataaataataggatgaggcaggaatcaaagacagatactgcgacatagggtgctccggctccagcgtctcgcaatgctatcgcgtgcacaccccccagacgaaaa

SEQ ID NO: 70719 - DNA, 120 bp, Homo sapiens; identical to SEQ ID NO: 59005
  misc_feature: 744 for SV(C|O) and mtDNA

SEQ ID NO: 70720 - DNA, 120 bp, Homo sapiens; identical to SEQ ID NO: 53252
  misc_feature: 744 for SV(C|O) and mtDNA

SEQ ID NO: 70721 - DNA, 120 bp, Homo sapiens
  misc_feature: 744 for SV(C|O) and mtDNA
acgacacgtactacgttgtagctcacttccactatgtcctatcaataggagctgtatttgccatcataggaggcttcattcactgatttcccctattctcaggctacaccctagaccaaa

SEQ ID NO: 70722 - DNA, 120 bp, Homo sapiens
  misc_feature: 744 for SV(C|O) and mtDNA
ttgtcgcatccacctttattatcagtctcttccccacaacaatattcatgtgcctagaccaagaagttattatctcgaactgacactgagccacaacccaaacaacccagctctccctaa

SEQ ID NO: 70723 - DNA, 120 bp, Homo sapiens; identical to SEQ ID NO: 56824
  misc_feature: 744 for SV(C|O) and mtDNA

SEQ ID NO: 70724 - DNA, 120 bp, Homo sapiens; identical to SEQ ID NO: 57029
  misc_feature: 744 for SV(C|O) and mtDNA

SEQ ID NO: 70725 - DNA, 120 bp, Homo sapiens; identical to SEQ ID NO: 52455
  misc_feature: 744 for SV(C|O) and mtDNA

SEQ ID NO: 70726 - DNA, 120 bp, Homo sapiens; identical to SEQ ID NO: 52753
  misc_feature: 744 for SV(C|O) and mtDNA

SEQ ID NO: 70727 - DNA, 120 bp, Homo sapiens
  misc_feature: 744 for SV(C|O) and mtDNA
ccataatattcatccctgtagcattattcgttacatggtccatcatagaattctcactgtgatatataaactcagacccaaacattaatcagttcttcaaatatctactcatcttcctaa

SEQ ID NO: 70728 - DNA, 120 bp, Homo sapiens
  misc_feature: 744 for SV(C|O) and mtDNA
ttactgagggctttgaaggctcttggtctgtatttaacctaaatttctataagattattagtataaaaggggagataggtaggagtagcgtggtaagggcgatgagtgtggggaggaatg

SEQ ID NO: 70729 - DNA, 120 bp, Homo sapiens
  misc_feature: 744 for SV(C|O) and mtDNA
ttaactaaaacccctacgcatttatatagaggagacaagtcgtaacatggtaagtgtactggaaagtgcacttggacgaaccagagtgtagcttaacacaaagcacccaacttacactta

SEQ ID NO: 70730 - DNA, 120 bp, Homo sapiens
  misc_feature: 744 for SV(C|O) and mtDNA
agtccaaagaggaacagctctttggacactaggaaaaaaccttgtagagagagtaaaaaatttaacacccatagtaggcctaaaagcagccaccaattaagaaagcgttcaagctcaaca

SEQ ID NO: 70731 - DNA, 120 bp, Homo sapiens
  misc_feature: 744 for SV(C|O) and mtDNA
tggtttcaagccaaccccatggcctccatgactttttcaaaaaggtattagaaaaaccatttcataactttgtcaaagttaaattataggctaaatcctatatatcttaatggcacatgc

SEQ ID NO: 70732 - DNA, 120 bp, Homo sapiens
  misc_feature: 744 for SV(C|O) and mtDNA
ataaaagagttactttgatagagtaaataataggagcttaaacccccttatttctaggactatgagaatcgaacccatccctgagaatccaaaattctccgtgccacctatcacacccca

SEQ ID NO: 70733 - DNA, 120 bp, Homo sapiens
  misc_feature: 744 for SV(C|O) and mtDNA
tgccccgacgttactcggactaccccgatgcatacaccacatgaaacatcctatcatctgtaggctcattcatttctctaacagcagtaatattaataattttcatgatttgagaagcct

SEQ ID NO: 70734 - DNA, 120 bp, Homo sapiens; identical to SEQ ID NO: 51730
  misc_feature: 744 for SV(C|O) and mtDNA

SEQ ID NO: 70735 - DNA, 120 bp, Homo sapiens; identical to SEQ ID NO: 54761
  misc_feature: 744 for SV(C|O) and mtDNA

SEQ ID NO: 70736 - DNA, 120 bp, Homo sapiens; identical to SEQ ID NO: 52061
  misc_feature: 744 for SV(C|O) and mtDNA

SEQ ID NO: 70737 - DNA, 120 bp, Homo sapiens
  misc_feature: 744 for SV(C|O) and mtDNA
gcgacatagggtgctccggctccagcgtctcgcaatgctatcgcgtgcacaccccccagacgaaaataccaaatgcatggagagctcccgtgagtggttaatagggtgatagacctgtga

SEQ ID NO: 70738 - DNA, 120 bp, Homo sapiens
  misc_feature: 744 for SV(C|O) and mtDNA
tattgatccccacctccaaatatctcatcaacaaccgactaatcaccacccaacaatgactaatcaaactaacctcaaaacaaatgataaccatacacaacactaaaggacgaacctgat

SEQ ID NO: 70739 - DNA, 120 bp, Homo sapiens
  misc_feature: 744 for SV(C|O) and mtDNA
gcttagaagaaaaccccacaaaccccattactaaacccacactcaacagaaacaaagcatacatcattattctcgcacggactacaaccacgaccaatgatatgaaaaaccatcgttgta

SEQ ID NO: 70740 - DNA, 120 bp, Homo sapiens; identical to SEQ ID NO: 55216
  misc_feature: 744 for SV(C|O) and mtDNA

SEQ ID NO: 70741 - DNA, 120 bp, Homo sapiens; identical to SEQ ID NO: 52464
  misc_feature: 744 for SV(C|O) and mtDNA

SEQ ID NO: 70742 - DNA, 120 bp, Homo sapiens
  misc_feature: 744 for SV(C|O) and mtDNA
acctggagtgactatatggatgccccccaccctaccacacattcgaagaacccgtatacataaaatctagacaaaaaaggaaggaatcgaaccccccaaagctggtttcaagccaacccc

SEQ ID NO: 70743 - DNA, 120 bp, Homo sapiens
  misc_feature: 744 for SV(C|O) and mtDNA
gggctttgaaggctcttggtctgtatttaacctaaatttctataagattattagtataaaaggggagataggtaggagtagcgtggtaagggcgatgagtgtggggaggaatggggtggg

SEQ ID NO: 70744 - DNA, 120 bp, Homo sapiens; identical to SEQ ID NO: 59070
  misc_feature: 744 for SV(C|O) and mtDNA

SEQ ID NO: 70745 - DNA, 120 bp, Homo sapiens; identical to SEQ ID NO: 55973
  misc_feature: 744 for SV(C|O) and mtDNA

SEQ ID NO: 70746 - DNA, 120 bp, Homo sapiens; identical to SEQ ID NO: 51956
  misc_feature: 744 for SV(C|O) and mtDNA

SEQ ID NO: 70747 - DNA, 120 bp, Homo sapiens
  misc_feature: 744 for SV(C|O) and mtDNA
agatatggggagtagtgtgattgaggtggagtagattaggcgtaggtagaagtagaggttaaggagggtgatggtggctatgatggtggggatgatgaggctattgttttttgtgaattc

SEQ ID NO: 70748 - DNA, 120 bp, Homo sapiens
  misc_feature: 744 for SV(C|O) and mtDNA
aagcgaaaagtcctaatagtagaagaaccctccataaacctggagtgactatatggatgccccccaccctaccacacattcgaagaacccgtatacataaaatctagacaaaaaaggaag

SEQ ID NO: 70749 - DNA, 120 bp, Homo sapiens
  misc_feature: 744 for SV(C|O) and mtDNA
atgggcgttgattagtagtagttactggttgaacattgtttgttggtgtatatattgtaattgagattgctcgggggaataggttatgtgattaggagtagggttaggatgagtgggaag

SEQ ID NO: 70750 - DNA, 120 bp, Homo sapiens
  misc_feature: 744 for SV(C|O) and mtDNA
ctggttgcctcatcgggtgatgatagccaaggtggggataagtgtggtttcgaagaagatataaaatatgattagttctgtggctgtgaatgttataattaaggagatttgtagggagat

SEQ ID NO: 70751 - DNA, 120 bp, Homo sapiens
  misc_feature: 744 for SV(C|O) and mtDNA
ctaaaacccctacgcatttatatagaggagacaagtcgtaacatggtaagtgtactggaaagtgcacttggacgaaccagagtgtagcttaacacaaagcacccaacttacacttaggag

SEQ ID NO: 70752 - DNA, 120 bp, Homo sapiens
  misc_feature: 744 for SV(C|O) and mtDNA
cgacatagggtgctccggctccagcgtctcgcaatgctatcgcgtgcacaccccccagacgaaaataccaaatgcatggagagctcccgtgagtggttaatagggtgatagacctgtgat

SEQ ID NO: 70753 - DNA, 120 bp, Homo sapiens; identical to SEQ ID NO: 52161
  misc_feature: 744 for SV(C|O) and mtDNA

SEQ ID NO: 70754 - DNA, 120 bp, Homo sapiens; identical to SEQ ID NO: 51798
  misc_feature: 744 for SV(C|O) and mtDNA

SEQ ID NO: 70755 - DNA, 120 bp, Homo sapiens; identical to SEQ ID NO: 51856
  misc_feature: 744 for SV(C|O) and mtDNA

SEQ ID NO: 70756 - DNA, 120 bp, Homo sapiens; identical to SEQ ID NO: 54273
  misc_feature: 744 for SV(C|O) and mtDNA

SEQ ID NO: 70757 - DNA, 120 bp, Homo sapiens
  misc_feature: 744 for SV(C|O) and mtDNA
agaccaatggatagctgttatcctttaaaagttgagaaagccatgttgttagacatgggggcatgagttagcagttcttgtgagctttctcggtaaataaggggtcgtaagcctctgttg

SEQ ID NO: 70758 - DNA, 120 bp, Homo sapiens
  misc_feature: 744 for SV(C|O) and mtDNA
atttggtttcggttgttttctattagactatggtgagctcaggtgattgatactcctgatgcgagtaatacggatgtgtttaggagtgggacttctaggggatttagcggggtgatgcct

SEQ ID NO: 70759 - DNA, 120 bp, Homo sapiens; identical to SEQ ID NO: 54209
  misc_feature: 744 for SV(C|O) and mtDNA

SEQ ID NO: 70760 - DNA, 120 bp, Homo sapiens; identical to SEQ ID NO: 53314
  misc_feature: 744 for SV(C|O) and mtDNA

SEQ ID NO: 70761 - DNA, 120 bp, Homo sapiens; identical to SEQ ID NO: 51767
  misc_feature: 743 for SV(C|O) and mtDNA

SEQ ID NO: 70762 - DNA, 120 bp, Homo sapiens
  misc_feature: 743 for SV(C|O) and mtDNA
tttggatatactacagcgatggctattgaggagtatcctgaggcatgggggtcaggggttgaggtcttggtgagtgttttagtggggttagcgatggaggtaggattggtgctgtgggtg

SEQ ID NO: 70763 - DNA, 120 bp, Homo sapiens; identical to SEQ ID NO: 56006
  misc_feature: 743 for SV(C|O) and mtDNA

SEQ ID NO: 70764 - DNA, 120 bp, Homo sapiens
  misc_feature: 743 for SV(C|O) and mtDNA
attgaacgtaggtgcgataaataataggatgaggcaggaatcaaagacagatactgcgacatagggtgctccggctccagcgtctcgcaatgctatcgcgtgcacaccccccagacgaaa

SEQ ID NO: 70765 - DNA, 120 bp, Homo sapiens
  misc_feature: 743 for SV(C|O) and mtDNA
atttattacctcagaagtttttttcttcgcaggatttttctgagccttttaccactccagcctagcccctaccccccaattaggagggcactggcccccaacaggcatcaccccgctaaa

SEQ ID NO: 70766 - DNA, 120 bp, Homo sapiens
  misc_feature: 743 for SV(C|O) and mtDNA
aaccccactaaaacactcaccaagacctcaacccctgacccccatgcctcaggatactcctcaatagccatcgctgtagtatatccaaagacaaccatcattccccctaaataaattaaa

SEQ ID NO: 70767 - DNA, 120 bp, Homo sapiens
  misc_feature: 743 for SV(C|O) and mtDNA
ttgtcgtgcaggtagaggcttactagaagtgtgaaaacgtaggcttggattaaggcgacagcgatttctaggatagtcagtagaattagaattgtgaagatgataagtgtagagggaagg

SEQ ID NO: 70768 - DNA, 120 bp, Homo sapiens
  misc_feature: 743 for SV(C|O) and mtDNA
ttcttcgaatttgcaattcaatatgaaaatcacctcggagctggtaaaaagaggcctaacccctgtctttagatttacagtccaatgcttcactcagccattttacctcacccccactga

SEQ ID NO: 70769 - DNA, 120 bp, Homo sapiens
  misc_feature: 743 for SV(C|O) and mtDNA
ttagatatggggagtagtgtgattgaggtggagtagattaggcgtaggtagaagtagaggttaaggagggtgatggtggctatgatggtggggatgatgaggctattgttttttgtgaat

SEQ ID NO: 70770 - DNA, 120 bp, Homo sapiens
  misc_feature: 743 for SV(C|O) and mtDNA
ttaattaaccactcattcatcgacctccccaccccatccaacatctccgcatgatgaaacttcggctcactccttggcgcctgcctgatcctccaaatcaccacaggactattcctagcc

SEQ ID NO: 70771 - DNA, 120 bp, Homo sapiens; identical to SEQ ID NO: 54944
  misc_feature: 743 for SV(C|O) and mtDNA

SEQ ID NO: 70772 - DNA, 120 bp, Homo sapiens
  misc_feature: 743 for SV(C|O) and mtDNA
tgtaggaagctgaataatttatgaaggagaggggtcagggttgattcgggaggatcctattggtgcgggggctttgtatgattatgggcgttgattagtagtagttactggttgaacatt

SEQ ID NO: 70773 - DNA, 120 bp, Homo sapiens
  misc_feature: 743 for SV(C|O) and mtDNA
acatttaactaaaacccctacgcatttatatagaggagacaagtcgtaacatggtaagtgtactggaaagtgcacttggacgaaccagagtgtagcttaacacaaagcacccaacttaca

SEQ ID NO: 70774 - DNA, 120 bp, Homo sapiens
  misc_feature: 743 for SV(C|O) and mtDNA
tgctaatggtggagttaaagactttttctctgatttgtccttggaaaaaggttttcatctccggtttacaagactggtgtattagtttatactacaaggacaggcccatttgagtatttt

SEQ ID NO: 70775 - DNA, 120 bp, Homo sapiens
  misc_feature: 743 for SV(C|O) and mtDNA
ggtcaagtatttatggtaccgtacaatattcatggtggctggcagtaatgtacgaattacatagcggttgttgatgggtgagtcaatacttgggtggcacccaaatctgcttccccatga

SEQ ID NO: 70776 - DNA, 120 bp, Homo sapiens
  misc_feature: 743 for SV(C|O) and mtDNA
tatgactccctaaagcccatgtcgaagcccccatcgctgggtcaatagtacttgccgcagtactcttaaaactaggcggctatggtataatacgcctcacactcattctcaaccccctga

SEQ ID NO: 70777 - DNA, 120 bp, Homo sapiens
  misc_feature: 743 for SV(C|O) and mtDNA
gtgaaatggattttggcgtaggtttggtctagggtgtagcctgagaataggggaaatcagtgaatgaagcctcctatgatggcaaatacagctcctattgataggacatagtggaagtga

SEQ ID NO: 70778 - DNA, 120 bp, Homo sapiens; identical to SEQ ID NO: 60068
  misc_feature: 743 for SV(C|O) and mtDNA

SEQ ID NO: 70779 - DNA, 120 bp, Homo sapiens
  misc_feature: 743 for SV(C|O) and mtDNA
tatcgaaggcctttttggacaggtggtgtgtggtggccttggtatgtgctttctcgtgttacatcgcgccatcattggtatatggttagtgtgttggttagtaggcctagtatgaggagc

SEQ ID NO: 70780 - DNA, 120 bp, Homo sapiens; identical to SEQ ID NO: 59194
  misc_feature: 743 for SV(C|O) and mtDNA

SEQ ID NO: 70781 - DNA, 120 bp, Homo sapiens
  misc_feature: 743 for SV(C|O) and mtDNA
tataatgaacagtgatagtattattccttctaggcatagtagggaggatatgaggtgtgagcggtatactagtattcctagaagtgagatggtaaatgctagtataatatttatgtaaat

SEQ ID NO: 70782 - DNA, 120 bp, Homo sapiens; identical to SEQ ID NO: 53067
  misc_feature: 743 for SV(C|O) and mtDNA

SEQ ID NO: 70783 - DNA, 120 bp, Homo sapiens; identical to SEQ ID NO: 54599
  misc_feature: 743 for SV(C|O) and mtDNA

SEQ ID NO: 70784 - DNA, 120 bp, Homo sapiens
  misc_feature: 743 for SV(C|O) and mtDNA
aaattaattaaccactcattcatcgacctccccaccccatccaacatctccgcatgatgaaacttcggctcactccttggcgcctgcctgatcctccaaatcaccacaggactattccta

SEQ ID NO: 70785 - DNA, 120 bp, Homo sapiens; identical to SEQ ID NO: 58658
  misc_feature: 743 for SV(C|O) and mtDNA

SEQ ID NO: 70786 - DNA, 120 bp, Homo sapiens
  misc_feature: 743 for SV(C|O) and mtDNA
gttaaagactttttctctgatttgtccttggaaaaaggttttcatctccggtttacaagactggtgtattagtttatactacaaggacaggcccatttgagtattttgttttcaattagg

SEQ ID NO: 70787 - DNA, 120 bp, Homo sapiens; identical to SEQ ID NO: 52086
  misc_feature: 743 for SV(C|O) and mtDNA

SEQ ID NO: 70788 - DNA, 120 bp, Homo sapiens
  misc_feature: 743 for SV(C|O) and mtDNA
gctaatggtggagttaaagactttttctctgatttgtccttggaaaaaggttttcatctccggtttacaagactggtgtattagtttatactacaaggacaggcccatttgagtattttg

SEQ ID NO: 70789 - DNA, 120 bp, Homo sapiens
  misc_feature: 743 for SV(C|O) and mtDNA
gaggggtggctttggagttgcagttgatgtgtgatagttgagggttgattgctgtacttgcttgtaagcatggggagggggttttgatgtggattgggtttttatgtactacaggtggtc

SEQ ID NO: 70790 - DNA, 120 bp, Homo sapiens
  misc_feature: 743 for SV(C|O) and mtDNA
gagggctttgaaggctcttggtctgtatttaacctaaatttctataagattattagtataaaaggggagataggtaggagtagcgtggtaagggcgatgagtgtggggaggaatggggtg

SEQ ID NO: 70791 - DNA, 120 bp, Homo sapiens
  misc_feature: 743 for SV(C|O) and mtDNA
ctgcgaagaaaaaaacttctgaggtaataaataggattatcccgtatcgaaggcctttttggacaggtggtgtgtggtggccttggtatgtgctttctcgtgttacatcgcgccatcatt

SEQ ID NO: 70792 - DNA, 120 bp, Homo sapiens; identical to SEQ ID NO: 52926
  misc_feature: 743 for SV(C|O) and mtDNA

SEQ ID NO: 70793 - DNA, 120 bp, Homo sapiens
  misc_feature: 743 for SV(C|O) and mtDNA
cgttcggtaagcattaggaatgccattgcgattagaatgggtacaatgaggagtaggaggttggccatgggtatgttgttaagaagaggaattgaacctctgactgtaaagttttaagtt

SEQ ID NO: 70794 - DNA, 120 bp, Homo sapiens
  misc_feature: 743 for SV(C|O) and mtDNA
aatattgaacgtaggtgcgataaataataggatgaggcaggaatcaaagacagatactgcgacatagggtgctccggctccagcgtctcgcaatgctatcgcgtgcacaccccccagacg

SEQ ID NO: 70795 - DNA, 120 bp, Homo sapiens
  misc_feature: 743 for SV(C|O) and mtDNA
cgcattcctactactcaacttaaactccagcaccacgaccctactactatctcgcacctgaaacaagctaacatgactaacacccttaattccatccaccctcctctccctaggaggcct

SEQ ID NO: 70796 - DNA, 120 bp, Homo sapiens; identical to SEQ ID NO: 60010
  misc_feature: 743 for SV(C|O) and mtDNA

SEQ ID NO: 70797 - DNA, 120 bp, Homo sapiens; identical to SEQ ID NO: 57622
  misc_feature: 743 for SV(C|O) and mtDNA

SEQ ID NO: 70798 - DNA, 120 bp, Homo sapiens
  misc_feature: 743 for SV(C|O) and mtDNA
ccgtaaagaggtatctttactataaaagctattgtgtaagctagtcatattaagttgttggctcaggagtttgatagttcttgggcagtgagagtgagtagtagaatgtttagtgagcct

SEQ ID NO: 70799 - DNA, 120 bp, Homo sapiens
  misc_feature: 743 for SV(C|O) and mtDNA
agaataggaagtatgtgcctgcgttcaggcgttctggctggttgcctcatcgggtgatgatagccaaggtggggataagtgtggtttcgaagaagatataaaatatgattagttctgtgg

SEQ ID NO: 70800 - DNA, 120 bp, Homo sapiens; identical to SEQ ID NO: 60791
  misc_feature: 743 for SV(C|O) and mtDNA

SEQ ID NO: 70801 - DNA, 120 bp, Homo sapiens
  misc_feature: 743 for SV(C|O) and mtDNA
agatcaaataataagaaggtaatagctactaagaagaattttatggagaaagggacgcgggcgggggatatagggtcgaagccgcactcgtaaggggtggatttttctatgtagccgttg

SEQ ID NO: 70802 - DNA, 120 bp, Homo sapiens; identical to SEQ ID NO: 55137
  misc_feature: 743 for SV(C|O) and mtDNA

SEQ ID NO: 70803 - DNA, 120 bp, Homo sapiens; identical to SEQ ID NO: 51888
  misc_feature: 743 for SV(C|O) and mtDNA

SEQ ID NO: 70804 - DNA, 120 bp, Homo sapiens; identical to SEQ ID NO: 59077
  misc_feature: 743 for SV(C|O) and mtDNA

SEQ ID NO: 70805 - DNA, 120 bp, Homo sapiens
  misc_feature: 743 for SV(C|O) and mtDNA
actagcatttaccatctcacttctaggaatactagtataccgctcacacctcatatcctccctactatgcctagaaggaataatactatcactgttcattatagctactctcataaccct

SEQ ID NO: 70806 - DNA, 120 bp, Homo sapiens; identical to SEQ ID NO: 53934
  misc_feature: 743 for SV(C|O) and mtDNA

SEQ ID NO: 70807 - DNA, 120 bp, Homo sapiens
  misc_feature: 742 for SV(C|O) and mtDNA
tacatggtccatcatagaattctcactgtgatatataaactcagacccaaacattaatcagttcttcaaatatctactcatcttcctaattaccatactaatcttagttaccgctaacaa

SEQ ID NO: 70808 - DNA, 120 bp, Homo sapiens
  misc_feature: 742 for SV(C|O) and mtDNA
gaagcgaaaagtcctaatagtagaagaaccctccataaacctggagtgactatatggatgccccccaccctaccacacattcgaagaacccgtatacataaaatctagacaaaaaaggaa

SEQ ID NO: 70809 - DNA, 120 bp, Homo sapiens
  misc_feature: 742 for SV(C|O) and mtDNA
ttcaaaggacatttaactaaaacccctacgcatttatatagaggagacaagtcgtaacatggtaagtgtactggaaagtgcacttggacgaaccagagtgtagcttaacacaaagcaccc

SEQ ID NO: 70810 - DNA, 120 bp, Homo sapiens
  misc_feature: 742 for SV(C|O) and mtDNA
ttagaagaaaaccccacaaaccccattactaaacccacactcaacagaaacaaagcatacatcattattctcgcacggactacaaccacgaccaatgatatgaaaaaccatcgttgtatt

SEQ ID NO: 70811 - DNA, 120 bp, Homo sapiens
  misc_feature: 742 for SV(C|O) and mtDNA
tgatgctaataattaggctgtgggtggttgtgttgattcaaattatgtgttttttggaaagtcatgtcagtggtagtaatataattgttgggacgattagttttagcattggagtaggtt

SEQ ID NO: 70812 - DNA, 120 bp, Homo sapiens
  misc_feature: 742 for SV(C|O) and mtDNA
tgatagagtaaataataggagcttaaacccccttatttctaggactatgagaatcgaacccatccctgagaatccaaaattctccgtgccacctatcacaccccatcctaaagtaaggtc

SEQ ID NO: 70813 - DNA, 120 bp, Homo sapiens; identical to SEQ ID NO: 55612
  misc_feature: 742 for SV(C|O) and mtDNA

SEQ ID NO: 70814 - DNA, 120 bp, Homo sapiens; identical to SEQ ID NO: 55639
  misc_feature: 742 for SV(C|O) and mtDNA

SEQ ID NO: 70815 - DNA, 120 bp, Homo sapiens
  misc_feature: 742 for SV(C|O) and mtDNA
atacagcaaggactaacccctataccttctgcataatgaattaactagaaataactttgcaaggagagccaaagctaagacccccgaaaccagacgagctacctaagaacagctaaaaga

SEQ ID NO: 70816 - DNA, 120 bp, Homo sapiens
  misc_feature: 742 for SV(C|O) and mtDNA
tctttggatatactacagcgatggctattgaggagtatcctgaggcatgggggtcaggggttgaggtcttggtgagtgttttagtggggttagcgatggaggtaggattggtgctgtggg

SEQ ID NO: 70817 - DNA, 120 bp, Homo sapiens
  misc_feature: 742 for SV(C|O) and mtDNA
agggcactggcccccaacaggcatcaccccgctaaatcccctagaagtcccactcctaaacacatccgtattactcgcatcaggagtatcaatcacctgagctcaccatagtctaataga

SEQ ID NO: 70818 - DNA, 120 bp, Homo sapiens; identical to SEQ ID NO: 51693
  misc_feature: 742 for SV(C|O) and mtDNA

SEQ ID NO: 70819 - DNA, 120 bp, Homo sapiens
  misc_feature: 742 for SV(C|O) and mtDNA
tagggtgtagaataggaagtatgtgcctgcgttcaggcgttctggctggttgcctcatcgggtgatgatagccaaggtggggataagtgtggtttcgaagaagatataaaatatgattag

SEQ ID NO: 70820 - DNA, 120 bp, Homo sapiens; identical to SEQ ID NO: 56867
  misc_feature: 742 for SV(C|O) and mtDNA

SEQ ID NO: 70821 - DNA, 120 bp, Homo sapiens
  misc_feature: 742 for SV(C|O) and mtDNA
cgtatggcccaccataattacccccatactccttacactattcctcatcacccaactaaaaatattaaacacaaactaccacctacctccctcaccaaagcccataaaaataaaaaatta

SEQ ID NO: 70822 - DNA, 120 bp, Homo sapiens; identical to SEQ ID NO: 53524
  misc_feature: 742 for SV(C|O) and mtDNA

SEQ ID NO: 70823 - DNA, 120 bp, Homo sapiens; identical to SEQ ID NO: 53287
  misc_feature: 742 for SV(C|O) and mtDNA

SEQ ID NO: 70824 - DNA, 120 bp, Homo sapiens
  misc_feature: 742 for SV(C|O) and mtDNA
atccacatcaaaaccccctccccatgcttacaagcaagtacagcaatcaaccctcaactatcacacatcaactgcaactccaaagccacccctcacccactaggataccaacaaacctac

SEQ ID NO: 70825 - DNA, 120 bp, Homo sapiens
  misc_feature: 742 for SV(C|O) and mtDNA
atcaccctatagaagaactaatgttagtataagtaacatgaaaacattctcctccgcataagcctgcgtcagattaaaacactgaactgacaattaacagcccaatatctacaatcaacc

SEQ ID NO: 70826 - DNA, 120 bp, Homo sapiens; identical to SEQ ID NO: 61087
  misc_feature: 742 for SV(C|O) and mtDNA

SEQ ID NO: 70827 - DNA, 120 bp, Homo sapiens; identical to SEQ ID NO: 51690
  misc_feature: 742 for SV(C|O) and mtDNA

SEQ ID NO: 70828 - DNA, 120 bp, Homo sapiens
  misc_feature: 742 for SV(C|O) and mtDNA
acatatttcttaggtttgagggggaatgctggagattgtaatgggtatggagacatatcatataagtaatgctagggtgagtggtaggaagttttttcataggaggtgtatgagttggtc

SEQ ID NO: 70829 - DNA, 120 bp, Homo sapiens
  misc_feature: 742 for SV(C|O) and mtDNA
cttcaccatttccgacggcatctacggctcaacattttttgtagccacaggcttccacggacttcacgtcattattggctcaactttcctcactatctgcttcatccgccaactaatatt

SEQ ID NO: 70830 - DNA, 120 bp, Homo sapiens
  misc_feature: 742 for SV(C|O) and mtDNA
cctttattatcagtctcttccccacaacaatattcatgtgcctagaccaagaagttattatctcgaactgacactgagccacaacccaaacaacccagctctccctaagcttcaaactag

SEQ ID NO: 70831 - DNA, 120 bp, Homo sapiens
  misc_feature: 742 for SV(C|O) and mtDNA
cctgcgaagaaaaaaacttctgaggtaataaataggattatcccgtatcgaaggcctttttggacaggtggtgtgtggtggccttggtatgtgctttctcgtgttacatcgcgccatcat

SEQ ID NO: 70832 - DNA, 120 bp, Homo sapiens; identical to SEQ ID NO: 60468
  misc_feature: 742 for SV(C|O) and mtDNA

SEQ ID NO: 70833 - DNA, 120 bp, Homo sapiens
  misc_feature: 742 for SV(C|O) and mtDNA
cactaaaggacgaacctgatctcttatactagtatccttaatcatttttattgccacaactaacctcctcggactcctgcctcactcatttacaccaaccacccaactatctataaacct

SEQ ID NO: 70834 - DNA, 120 bp, Homo sapiens
  misc_feature: 742 for SV(C|O) and mtDNA
aaggcataattaaactttacttcctctctttcttcttcccactcatcctaaccctactcctaatcacataacctattcccccgagcaatctcaattacaatatatacaccaacaaacaat

SEQ ID NO: 70835 - DNA, 120 bp, Homo sapiens
  misc_feature: 742 for SV(C|O) and mtDNA
agtaaaaaatttaacacccatagtaggcctaaaagcagccaccaattaagaaagcgttcaagctcaacacccactacctaaaaaatcccaaacatataactgaactcctcacacccaatt

SEQ ID NO: 70836 - DNA, 120 bp, Homo sapiens
  misc_feature: 742 for SV(C|O) and mtDNA
acttctccataatattcatccctgtagcattattcgttacatggtccatcatagaattctcactgtgatatataaactcagacccaaacattaatcagttcttcaaatatctactcatct

SEQ ID NO: 70837 - DNA, 120 bp, Homo sapiens; identical to SEQ ID NO: 56275
  misc_feature: 742 for SV(C|O) and mtDNA

SEQ ID NO: 70838 - DNA, 120 bp, Homo sapiens
  misc_feature: 741 for SV(C|O) and mtDNA
ctaaatactaccgtatggcccaccataattacccccatactccttacactattcctcatcacccaactaaaaatattaaacacaaactaccacctacctccctcaccaaagcccataaaa

SEQ ID NO: 70839 - DNA, 120 bp, Homo sapiens
  misc_feature: 741 for SV(C|O) and mtDNA
tttggtttcggttgttttctattagactatggtgagctcaggtgattgatactcctgatgcgagtaatacggatgtgtttaggagtgggacttctaggggatttagcggggtgatgcctg

SEQ ID NO: 70840 - DNA, 120 bp, Homo sapiens
  misc_feature: 741 for SV(C|O) and mtDNA
ttcaaactagactacttctccataatattcatccctgtagcattattcgttacatggtccatcatagaattctcactgtgatatataaactcagacccaaacattaatcagttcttcaaa

SEQ ID NO: 70841 - DNA, 120 bp, Homo sapiens
  misc_feature: 741 for SV(C|O) and mtDNA
tttctaggatagtcagtagaattagaattgtgaagatgataagtgtagagggaaggttaatggttgatattgctagggtggcgcttccaattaggtgcatgagtaggtggcctgcagtaa

SEQ ID NO: 70842 - DNA, 120 bp, Homo sapiens
  misc_feature: 741 for SV(C|O) and mtDNA
tttatatatcacagtgagaattctatgatggaccatgtaacgaataatgctacagggatgaatattatggagaagtagtctagtttgaagcttagggagagctgggttgtttgggttgtg

SEQ ID NO: 70843 - DNA, 120 bp, Homo sapiens; identical to SEQ ID NO: 58645
  misc_feature: 741 for SV(C|O) and mtDNA

SEQ ID NO: 70844 - DNA, 120 bp, Homo sapiens; identical to SEQ ID NO: 51806
  misc_feature: 741 for SV(C|O) and mtDNA

SEQ ID NO: 70845 - DNA, 120 bp, Homo sapiens; identical to SEQ ID NO: 54654
  misc_feature: 741 for SV(C|O) and mtDNA

SEQ ID NO: 70846 - DNA, 120 bp, Homo sapiens; identical to SEQ ID NO: 60315
  misc_feature: 741 for SV(C|O) and mtDNA

SEQ ID NO: 70847 - DNA, 120 bp, Homo sapiens
  misc_feature: 741 for SV(C|O) and mtDNA
gttagatatggggagtagtgtgattgaggtggagtagattaggcgtaggtagaagtagaggttaaggagggtgatggtggctatgatggtggggatgatgaggctattgttttttgtgaa

SEQ ID NO: 70848 - DNA, 120 bp, Homo sapiens
  misc_feature: 741 for SV(C|O) and mtDNA
ttcaaactgtcattttatttttacgttgttagatatggggagtagtgtgattgaggtggagtagattaggcgtaggtagaagtagaggttaaggagggtgatggtggctatgatggtggg

SEQ ID NO: 70849 - DNA, 120 bp, Homo sapiens
  misc_feature: 741 for SV(C|O) and mtDNA
ttatttggtttcggttgttttctattagactatggtgagctcaggtgattgatactcctgatgcgagtaatacggatgtgtttaggagtgggacttctaggggatttagcggggtgatgc

SEQ ID NO: 70850 - DNA, 120 bp, Homo sapiens
  misc_feature: 741 for SV(C|O) and mtDNA
ttaccatctcacttctaggaatactagtataccgctcacacctcatatcctccctactatgcctagaaggaataatactatcactgttcattatagctactctcataaccctcaacaccc

SEQ ID NO: 70851 - DNA, 120 bp, Homo sapiens
  misc_feature: 741 for SV(C|O) and mtDNA
tgcataatgaattaactagaaataactttgcaaggagagccaaagctaagacccccgaaaccagacgagctacctaagaacagctaaaagagcacacccgtctatgtagcaaaatagtgg

SEQ ID NO: 70852 - DNA, 120 bp, Homo sapiens
  misc_feature: 741 for SV(C|O) and mtDNA
tgataaaagagttactttgatagagtaaataataggagcttaaacccccttatttctaggactatgagaatcgaacccatccctgagaatccaaaattctccgtgccacctatcacaccc

SEQ ID NO: 70853 - DNA, 120 bp, Homo sapiens
  misc_feature: 741 for SV(C|O) and mtDNA
tctgagccttttaccactccagcctagcccctaccccccaattaggagggcactggcccccaacaggcatcaccccgctaaatcccctagaagtcccactcctaaacacatccgtattac

SEQ ID NO: 70854 - DNA, 120 bp, Homo sapiens; identical to SEQ ID NO: 52406
  misc_feature: 741 for SV(C|O) and mtDNA

SEQ ID NO: 70855 - DNA, 120 bp, Homo sapiens
  misc_feature: 741 for SV(C|O) and mtDNA
tctaacagcagtaatattaataattttcatgatttgagaagccttcgcttcgaagcgaaaagtcctaatagtagaagaaccctccataaacctggagtgactatatggatgccccccacc

SEQ ID NO: 70856 - DNA, 120 bp, Homo sapiens
  misc_feature: 741 for SV(C|O) and mtDNA
tcgacctccccaccccatccaacatctccgcatgatgaaacttcggctcactccttggcgcctgcctgatcctccaaatcaccacaggactattcctagccatgcactactcaccagacg

SEQ ID NO: 70857 - DNA, 120 bp, Homo sapiens; identical to SEQ ID NO: 52694
  misc_feature: 741 for SV(C|O) and mtDNA

SEQ ID NO: 70858 - DNA, 120 bp, Homo sapiens
  misc_feature: 741 for SV(C|O) and mtDNA
tcatccctgtagcattattcgttacatggtccatcatagaattctcactgtgatatataaactcagacccaaacattaatcagttcttcaaatatctactcatcttcctaattaccatac

SEQ ID NO: 70859 - DNA, 120 bp, Homo sapiens; identical to SEQ ID NO: 56628
  misc_feature: 741 for SV(C|O) and mtDNA

SEQ ID NO: 70860 - DNA, 120 bp, Homo sapiens
  misc_feature: 741 for SV(C|O) and mtDNA
tatcaccaggctcggtaggtttgtcgcctctacctataaatcttcccactattttgctacatagacgggtgtgctcttttagctgttcttaggtagctcgtctggtttcgggggtcttag

SEQ ID NO: 70861 - DNA, 120 bp, Homo sapiens
  misc_feature: 741 for SV(C|O) and mtDNA
tacagcaaggactaacccctataccttctgcataatgaattaactagaaataactttgcaaggagagccaaagctaagacccccgaaaccagacgagctacctaagaacagctaaaagag

SEQ ID NO: 70862 - DNA, 120 bp, Homo sapiens; identical to SEQ ID NO: 53983
  misc_feature: 741 for SV(C|O) and mtDNA

SEQ ID NO: 70863 - DNA, 120 bp, Homo sapiens
  misc_feature: 741 for SV(C|O) and mtDNA
gagtagctataatgaacagtgatagtattattccttctaggcatagtagggaggatatgaggtgtgagcggtatactagtattcctagaagtgagatggtaaatgctagtataatattta

SEQ ID NO: 70864 - DNA, 120 bp, Homo sapiens; identical to SEQ ID NO: 57973
  misc_feature: 741 for SV(C|O) and mtDNA

SEQ ID NO: 70865 - DNA, 120 bp, Homo sapiens
  misc_feature: 741 for SV(C|O) and mtDNA
accaagcataatacagcaaggactaacccctataccttctgcataatgaattaactagaaataactttgcaaggagagccaaagctaagacccccgaaaccagacgagctacctaagaac

SEQ ID NO: 70866 - DNA, 120 bp, Homo sapiens
  misc_feature: 741 for SV(C|O) and mtDNA
ctctaacagcagtaatattaataattttcatgatttgagaagccttcgcttcgaagcgaaaagtcctaatagtagaagaaccctccataaacctggagtgactatatggatgccccccac

SEQ ID NO: 70867 - DNA, 120 bp, Homo sapiens
  misc_feature: 741 for SV(C|O) and mtDNA
gtatatagcctagaatttttcgttcggtaagcattaggaatgccattgcgattagaatgggtacaatgaggagtaggaggttggccatgggtatgttgttaagaagaggaattgaacctc

SEQ ID NO: 70868 - DNA, 120 bp, Homo sapiens
  misc_feature: 741 for SV(C|O) and mtDNA
gagctttaatttattaatgcaaacagtacctaacaaacccacaggtcctaaactaccaaacctgcattaaaaatttcggttggggcgacctcggagcagaacccaacctccgagcagtac

SEQ ID NO: 70869 - DNA, 120 bp, Homo sapiens
  misc_feature: 741 for SV(C|O) and mtDNA
attcgaagaacccgtatacataaaatctagacaaaaaaggaaggaatcgaaccccccaaagctggtttcaagccaaccccatggcctccatgactttttcaaaaaggtattagaaaaacc

SEQ ID NO: 70870 - DNA, 120 bp, Homo sapiens; identical to SEQ ID NO: 51901
  misc_feature: 741 for SV(C|O) and mtDNA

SEQ ID NO: 70871 - DNA, 120 bp, Homo sapiens
  misc_feature: 741 for SV(C|O) and mtDNA
cctgtttaccaaaaacatcacctctagcatcaccagtattagaggcaccgcctgcccagtgacacatgtttaacggccgcggtaccctaaccgtgcaaaggtagcataatcacttgttcc

SEQ ID NO: 70872 - DNA, 120 bp, Homo sapiens
  misc_feature: 741 for SV(C|O) and mtDNA
gcggcaagtactattgacccagcgatgggggcttcgacatgggctttagggagtcataagtggagtccgtaaagaggtatctttactataaaagctattgtgtaagctagtcatattaag

SEQ ID NO: 70873 - DNA, 120 bp, Homo sapiens
  misc_feature: 741 for SV(C|O) and mtDNA
gagtaaaaaatttaacacccatagtaggcctaaaagcagccaccaattaagaaagcgttcaagctcaacacccactacctaaaaaatcccaaacatataactgaactcctcacacccaat

SEQ ID NO: 70874 - DNA, 120 bp, Homo sapiens
  misc_feature: 741 for SV(C|O) and mtDNA
ctagcatttaccatctcacttctaggaatactagtataccgctcacacctcatatcctccctactatgcctagaaggaataatactatcactgttcattatagctactctcataaccctc

SEQ ID NO: 70875 - DNA, 120 bp, Homo sapiens
  misc_feature: 741 for SV(C|O) and mtDNA
gagacatacagaaatagtcaaaccacgtctacaaaatgccagtatcaggcggcggcttcgaagccaaagtgatgtttggatgtaaagtgaaatattagttggcggatgaagcagatagtg

SEQ ID NO: 70876 - DNA, 120 bp, Homo sapiens
  misc_feature: 741 for SV(C|O) and mtDNA
gaccaatggatagctgttatcctttaaaagttgagaaagccatgttgttagacatgggggcatgagttagcagttcttgtgagctttctcggtaaataaggggtcgtaagcctctgttgt

SEQ ID NO: 70877 - DNA, 120 bp, Homo sapiens; identical to SEQ ID NO: 54587
  misc_feature: 741 for SV(C|O) and mtDNA

SEQ ID NO: 70878 - DNA, 120 bp, Homo sapiens
  misc_feature: 741 for SV(C|O) and mtDNA
cgaagaacccgtatacataaaatctagacaaaaaaggaaggaatcgaaccccccaaagctggtttcaagccaaccccatggcctccatgactttttcaaaaaggtattagaaaaaccatt

SEQ ID NO: 70879 - DNA, 120 bp, Homo sapiens; identical to SEQ ID NO: 54486
  misc_feature: 741 for SV(C|O) and mtDNA

SEQ ID NO: 70880 - DNA, 120 bp, Homo sapiens
  misc_feature: 741 for SV(C|O) and mtDNA
atcccgtatcgaaggcctttttggacaggtggtgtgtggtggccttggtatgtgctttctcgtgttacatcgcgccatcattggtatatggttagtgtgttggttagtaggcctagtatg

SEQ ID NO: 70881 - DNA, 120 bp, Homo sapiens
  misc_feature: 741 for SV(C|O) and mtDNA
atctccttaattataacattcacagccacagaactaatcatattttatatcttcttcgaaaccacacttatccccaccttggctatcatcacccgatgaggcaaccagccagaacgcctg

SEQ ID NO: 70882 - DNA, 120 bp, Homo sapiens; identical to SEQ ID NO: 52326
  misc_feature: 741 for SV(C|O) and mtDNA

SEQ ID NO: 70883 - DNA, 120 bp, Homo sapiens
  misc_feature: 740 for SV(C|O) and mtDNA
tttttcgttcggtaagcattaggaatgccattgcgattagaatgggtacaatgaggagtaggaggttggccatgggtatgttgttaagaagaggaattgaacctctgactgtaaagtttt

SEQ ID NO: 70884 - DNA, 120 bp, Homo sapiens; identical to SEQ ID NO: 51775
  misc_feature: 740 for SV(C|O) and mtDNA

SEQ ID NO: 70885 - DNA, 120 bp, Homo sapiens
  misc_feature: 740 for SV(C|O) and mtDNA
tcaagtatttatggtaccgtacaatattcatggtggctggcagtaatgtacgaattacatagcggttgttgatgggtgagtcaatacttgggtggcacccaaatctgcttccccatgaaa

SEQ ID NO: 70886 - DNA, 120 bp, Homo sapiens
  misc_feature: 740 for SV(C|O) and mtDNA
tttaccatctcacttctaggaatactagtataccgctcacacctcatatcctccctactatgcctagaaggaataatactatcactgttcattatagctactctcataaccctcaacacc

SEQ ID NO: 70887 - DNA, 120 bp, Homo sapiens
  misc_feature: 740 for SV(C|O) and mtDNA
gcataatcacttgttccttaaatagggacctgtatgaatggctccacgagggttcagctgtctcttacttttaaccagtgaaattgacctgcccgtgaagaggcgggcatgacacagcaa

SEQ ID NO: 70888 - DNA, 120 bp, Homo sapiens
  misc_feature: 740 for SV(C|O) and mtDNA
atagtgtaggaagctgaataatttatgaaggagaggggtcagggttgattcgggaggatcctattggtgcgggggctttgtatgattatgggcgttgattagtagtagttactggttgaa

SEQ ID NO: 70889 - DNA, 120 bp, Homo sapiens; identical to SEQ ID NO: 52272
  misc_feature: 740 for SV(C|O) and mtDNA

SEQ ID NO: 70890 - DNA, 120 bp, Homo sapiens
  misc_feature: 740 for SV(C|O) and mtDNA
tgtatatagcctagaatttttcgttcggtaagcattaggaatgccattgcgattagaatgggtacaatgaggagtaggaggttggccatgggtatgttgttaagaagaggaattgaacct

SEQ ID NO: 70891 - DNA, 120 bp, Homo sapiens
  misc_feature: 740 for SV(C|O) and mtDNA
tgggtgctaatggtggagttaaagactttttctctgatttgtccttggaaaaaggttttcatctccggtttacaagactggtgtattagtttatactacaaggacaggcccatttgagta

SEQ ID NO: 70892 - DNA, 120 bp, Homo sapiens
  misc_feature: 740 for SV(C|O) and mtDNA
agcataatcacttgttccttaaatagggacctgtatgaatggctccacgagggttcagctgtctcttacttttaaccagtgaaattgacctgcccgtgaagaggcgggcatgacacagca

SEQ ID NO: 70893 - DNA, 120 bp, Homo sapiens; identical to SEQ ID NO: 52318
  misc_feature: 740 for SV(C|O) and mtDNA

SEQ ID NO: 70894 - DNA, 120 bp, Homo sapiens
  misc_feature: 740 for SV(C|O) and mtDNA
tccaaagaggaacagctctttggacactaggaaaaaaccttgtagagagagtaaaaaatttaacacccatagtaggcctaaaagcagccaccaattaagaaagcgttcaagctcaacacc

SEQ ID NO: 70895 - DNA, 120 bp, Homo sapiens
  misc_feature: 740 for SV(C|O) and mtDNA
tagggctaggatgatgattaataagagggatgacataactattagtggtaggttagttgtttgtagggctcatggtaggggtaaaaggagggcaatttctagatcaaataataagaaggt

SEQ ID NO: 70896 - DNA, 120 bp, Homo sapiens
  misc_feature: 740 for SV(C|O) and mtDNA
tagatatggggagtagtgtgattgaggtggagtagattaggcgtaggtagaagtagaggttaaggagggtgatggtggctatgatggtggggatgatgaggctattgttttttgtgaatt

SEQ ID NO: 70897 - DNA, 120 bp, Homo sapiens
  misc_feature: 740 for SV(C|O) and mtDNA
tacttctccataatattcatccctgtagcattattcgttacatggtccatcatagaattctcactgtgatatataaactcagacccaaacattaatcagttcttcaaatatctactcatc

SEQ ID NO: 70898 - DNA, 120 bp, Homo sapiens
  misc_feature: 740 for SV(C|O) and mtDNA
taccactcaccctagcattacttatatgatatgtctccatacccattacaatctccagcattccccctcaaacctaagaaatatgtctgataaaagagttactttgatagagtaaataat

SEQ ID NO: 70899 - DNA, 120 bp, Homo sapiens
  misc_feature: 740 for SV(C|O) and mtDNA
gaaggagaggggtcagggttgattcgggaggatcctattggtgcgggggctttgtatgattatgggcgttgattagtagtagttactggttgaacattgtttgttggtgtatatattgta

SEQ ID NO: 70900 - DNA, 120 bp, Homo sapiens; identical to SEQ ID NO: 55124
  misc_feature: 740 for SV(C|O) and mtDNA

SEQ ID NO: 70901 - DNA, 120 bp, Homo sapiens
  misc_feature: 740 for SV(C|O) and mtDNA
gtttggtctagggtgtagcctgagaataggggaaatcagtgaatgaagcctcctatgatggcaaatacagctcctattgataggacatagtggaagtgagctacaacgtagtacgtgtcg

SEQ ID NO: 70902 - DNA, 120 bp, Homo sapiens; identical to SEQ ID NO: 52503
  misc_feature: 740 for SV(C|O) and mtDNA

SEQ ID NO: 70903 - DNA, 120 bp, Homo sapiens
  misc_feature: 740 for SV(C|O) and mtDNA
gacatttaactaaaacccctacgcatttatatagaggagacaagtcgtaacatggtaagtgtactggaaagtgcacttggacgaaccagagtgtagcttaacacaaagcacccaacttac

SEQ ID NO: 70904 - DNA, 120 bp, Homo sapiens; identical to SEQ ID NO: 53110
  misc_feature: 740 for SV(C|O) and mtDNA

SEQ ID NO: 70905 - DNA, 120 bp, Homo sapiens
  misc_feature: 740 for SV(C|O) and mtDNA
ggcttagaagaaaaccccacaaaccccattactaaacccacactcaacagaaacaaagcatacatcattattctcgcacggactacaaccacgaccaatgatatgaaaaaccatcgttgt

SEQ ID NO: 70906 - DNA, 120 bp, Homo sapiens
  misc_feature: 740 for SV(C|O) and mtDNA
caacaatattcatgtgcctagaccaagaagttattatctcgaactgacactgagccacaacccaaacaacccagctctccctaagcttcaaactagactacttctccataatattcatcc

SEQ ID NO: 70907 - DNA, 120 bp, Homo sapiens
  misc_feature: 740 for SV(C|O) and mtDNA
gcttcttcgaatttgcaattcaatatgaaaatcacctcggagctggtaaaaagaggcctaacccctgtctttagatttacagtccaatgcttcactcagccattttacctcacccccact

SEQ ID NO: 70908 - DNA, 120 bp, Homo sapiens
  misc_feature: 740 for SV(C|O) and mtDNA
gaataggaagtatgtgcctgcgttcaggcgttctggctggttgcctcatcgggtgatgatagccaaggtggggataagtgtggtttcgaagaagatataaaatatgattagttctgtggc

SEQ ID NO: 70909 - DNA, 120 bp, Homo sapiens
  misc_feature: 740 for SV(C|O) and mtDNA
aatacagcaaggactaacccctataccttctgcataatgaattaactagaaataactttgcaaggagagccaaagctaagacccccgaaaccagacgagctacctaagaacagctaaaag

SEQ ID NO: 70910 - DNA, 120 bp, Homo sapiens
  misc_feature: 740 for SV(C|O) and mtDNA
ctttggatatactacagcgatggctattgaggagtatcctgaggcatgggggtcaggggttgaggtcttggtgagtgttttagtggggttagcgatggaggtaggattggtgctgtgggt

SEQ ID NO: 70911 - DNA, 120 bp, Homo sapiens; identical to SEQ ID NO: 55101
  misc_feature: 740 for SV(C|O) and mtDNA

SEQ ID NO: 70912 - DNA, 120 bp, Homo sapiens
  misc_feature: 740 for SV(C|O) and mtDNA
cttagaagaaaaccccacaaaccccattactaaacccacactcaacagaaacaaagcatacatcattattctcgcacggactacaaccacgaccaatgatatgaaaaaccatcgttgtat

SEQ ID NO: 70913 - DNA, 120 bp, Homo sapiens
  misc_feature: 740 for SV(C|O) and mtDNA
ccttcaccatttccgacggcatctacggctcaacattttttgtagccacaggcttccacggacttcacgtcattattggctcaactttcctcactatctgcttcatccgccaactaatat

SEQ ID NO: 70914 - DNA, 120 bp, Homo sapiens; identical to SEQ ID NO: 52912
  misc_feature: 740 for SV(C|O) and mtDNA

SEQ ID NO: 70915 - DNA, 120 bp, Homo sapiens
  misc_feature: 740 for SV(C|O) and mtDNA
attatgggcgttgattagtagtagttactggttgaacattgtttgttggtgtatatattgtaattgagattgctcgggggaataggttatgtgattaggagtagggttaggatgagtggg

SEQ ID NO: 70916 - DNA, 120 bp, Homo sapiens; identical to SEQ ID NO: 54609
  misc_feature: 740 for SV(C|O) and mtDNA

SEQ ID NO: 70917 - DNA, 120 bp, Homo sapiens; identical to SEQ ID NO: 56422
  misc_feature: 740 for SV(C|O) and mtDNA

SEQ ID NO: 70918 - DNA, 120 bp, Homo sapiens; identical to SEQ ID NO: 53970
  misc_feature: 740 for SV(C|O) and mtDNA

SEQ ID NO: 70919 - DNA, 120 bp, Homo sapiens
  misc_feature: 739 for SV(C|O) and mtDNA
ttttcttctaagccttctcctatttatgggggtttagtattgattgttagcggtgtggtcgggtgtgttattattctgaattttgggggaggttatatgggtttaatagtttttttaatt

SEQ ID NO: 70920 - DNA, 120 bp, Homo sapiens; identical to SEQ ID NO: 54162
  misc_feature: 739 for SV(C|O) and mtDNA

SEQ ID NO: 70921 - DNA, 120 bp, Homo sapiens
  misc_feature: 739 for SV(C|O) and mtDNA
tttaactaaaacccctacgcatttatatagaggagacaagtcgtaacatggtaagtgtactggaaagtgcacttggacgaaccagagtgtagcttaacacaaagcacccaacttacactt

SEQ ID NO: 70922 - DNA, 120 bp, Homo sapiens
  misc_feature: 739 for SV(C|O) and mtDNA
ttgttagacatgggggcatgagttagcagttcttgtgagctttctcggtaaataaggggtcgtaagcctctgttgtcagattcacaatctgatgttttggttaaactatatttacaagag

SEQ ID NO: 70923 - DNA, 120 bp, Homo sapiens; identical to SEQ ID NO: 51972
  misc_feature: 739 for SV(C|O) and mtDNA

SEQ ID NO: 70924 - DNA, 120 bp, Homo sapiens
  misc_feature: 739 for SV(C|O) and mtDNA
tagttattatcgaaaccatcagcctactcattcaaccaatagccctggccgtacgcctaaccgctaacattactgcaggccacctactcatgcacctaattggaagcgccaccctagcaa

SEQ ID NO: 70925 - DNA, 120 bp, Homo sapiens
  misc_feature: 739 for SV(C|O) and mtDNA
ttagtccaaagaggaacagctctttggacactaggaaaaaaccttgtagagagagtaaaaaatttaacacccatagtaggcctaaaagcagccaccaattaagaaagcgttcaagctcaa

SEQ ID NO: 70926 - DNA, 120 bp, Homo sapiens; identical to SEQ ID NO: 51708
  misc_feature: 739 for SV(C|O) and mtDNA

SEQ ID NO: 70927 - DNA, 120 bp, Homo sapiens
  misc_feature: 739 for SV(C|O) and mtDNA
ttcaccatttccgacggcatctacggctcaacattttttgtagccacaggcttccacggacttcacgtcattattggctcaactttcctcactatctgcttcatccgccaactaatattt

SEQ ID NO: 70928 - DNA, 120 bp, Homo sapiens; identical to SEQ ID NO: 55439
  misc_feature: 739 for SV(C|O) and mtDNA

SEQ ID NO: 70929 - DNA, 120 bp, Homo sapiens; identical to SEQ ID NO: 54835
  misc_feature: 739 for SV(C|O) and mtDNA

SEQ ID NO: 70930 - DNA, 120 bp, Homo sapiens
  misc_feature: 739 for SV(C|O) and mtDNA
agtgtaggaagctgaataatttatgaaggagaggggtcagggttgattcgggaggatcctattggtgcgggggctttgtatgattatgggcgttgattagtagtagttactggttgaaca

SEQ ID NO: 70931 - DNA, 120 bp, Homo sapiens
  misc_feature: 739 for SV(C|O) and mtDNA
tggctggttgcctcatcgggtgatgatagccaaggtggggataagtgtggtttcgaagaagatataaaatatgattagttctgtggctgtgaatgttataattaaggagatttgtaggga

SEQ ID NO: 70932 - DNA, 120 bp, Homo sapiens; identical to SEQ ID NO: 59656
  misc_feature: 739 for SV(C|O) and mtDNA

SEQ ID NO: 70933 - DNA, 120 bp, Homo sapiens
  misc_feature: 739 for SV(C|O) and mtDNA
ccaatggatagctgttatcctttaaaagttgagaaagccatgttgttagacatgggggcatgagttagcagttcttgtgagctttctcggtaaataaggggtcgtaagcctctgttgtca

SEQ ID NO: 70934 - DNA, 120 bp, Homo sapiens
  misc_feature: 739 for SV(C|O) and mtDNA
cacggactacaaccacgaccaatgatatgaaaaaccatcgttgtatttcaactacaagaacaccaatgaccccaatacgcaaaattaaccccctaataaaattaattaaccactcattca

SEQ ID NO: 70935 - DNA, 120 bp, Homo sapiens
  misc_feature: 739 for SV(C|O) and mtDNA
gccccccaccctaccacacattcgaagaacccgtatacataaaatctagacaaaaaaggaaggaatcgaaccccccaaagctggtttcaagccaaccccatggcctccatgactttttca

SEQ ID NO: 70936 - DNA, 120 bp, Homo sapiens; identical to SEQ ID NO: 54468
  misc_feature: 739 for SV(C|O) and mtDNA

SEQ ID NO: 70937 - DNA, 120 bp, Homo sapiens
  misc_feature: 739 for SV(C|O) and mtDNA
tcggtaagcattaggaatgccattgcgattagaatgggtacaatgaggagtaggaggttggccatgggtatgttgttaagaagaggaattgaacctctgactgtaaagttttaagtttta

SEQ ID NO: 70938 - DNA, 120 bp, Homo sapiens; identical to SEQ ID NO: 52027
  misc_feature: 739 for SV(C|O) and mtDNA

SEQ ID NO: 70939 - DNA, 120 bp, Homo sapiens
  misc_feature: 739 for SV(C|O) and mtDNA
tatatatcacagtgagaattctatgatggaccatgtaacgaataatgctacagggatgaatattatggagaagtagtctagtttgaagcttagggagagctgggttgtttgggttgtggc

SEQ ID NO: 70940 - DNA, 120 bp, Homo sapiens
  misc_feature: 739 for SV(C|O) and mtDNA
actaaaggacgaacctgatctcttatactagtatccttaatcatttttattgccacaactaacctcctcggactcctgcctcactcatttacaccaaccacccaactatctataaaccta

SEQ ID NO: 70941 - DNA, 120 bp, Homo sapiens
  misc_feature: 739 for SV(C|O) and mtDNA
cgtaaagaggtatctttactataaaagctattgtgtaagctagtcatattaagttgttggctcaggagtttgatagttcttgggcagtgagagtgagtagtagaatgtttagtgagccta

SEQ ID NO: 70942 - DNA, 120 bp, Homo sapiens
  misc_feature: 739 for SV(C|O) and mtDNA
tactgagggctttgaaggctcttggtctgtatttaacctaaatttctataagattattagtataaaaggggagataggtaggagtagcgtggtaagggcgatgagtgtggggaggaatgg

SEQ ID NO: 70943 - DNA, 120 bp, Homo sapiens; identical to SEQ ID NO: 53340
  misc_feature: 739 for SV(C|O) and mtDNA

SEQ ID NO: 70944 - DNA, 120 bp, Homo sapiens
  misc_feature: 739 for SV(C|O) and mtDNA
ggttgcctcatcgggtgatgatagccaaggtggggataagtgtggtttcgaagaagatataaaatatgattagttctgtggctgtgaatgttataattaaggagatttgtagggagatta

SEQ ID NO: 70945 - DNA, 120 bp, Homo sapiens
  misc_feature: 739 for SV(C|O) and mtDNA
taataaaattaattaaccactcattcatcgacctccccaccccatccaacatctccgcatgatgaaacttcggctcactccttggcgcctgcctgatcctccaaatcaccacaggactat

SEQ ID NO: 70946 - DNA, 120 bp, Homo sapiens; identical to SEQ ID NO: 57276
  misc_feature: 739 for SV(C|O) and mtDNA

SEQ ID NO: 70947 - DNA, 120 bp, Homo sapiens
  misc_feature: 739 for SV(C|O) and mtDNA
taaaggacgaacctgatctcttatactagtatccttaatcatttttattgccacaactaacctcctcggactcctgcctcactcatttacaccaaccacccaactatctataaacctagc

SEQ ID NO: 70948 - DNA, 120 bp, Homo sapiens
  misc_feature: 739 for SV(C|O) and mtDNA
catttaactaaaacccctacgcatttatatagaggagacaagtcgtaacatggtaagtgtactggaaagtgcacttggacgaaccagagtgtagcttaacacaaagcacccaacttacac

SEQ ID NO: 70949 - DNA, 120 bp, Homo sapiens
  misc_feature: 739 for SV(C|O) and mtDNA
gtcctatcaataggagctgtatttgccatcataggaggcttcattcactgatttcccctattctcaggctacaccctagaccaaacctacgccaaaatccatttcactatcatattcatc

SEQ ID NO: 70950 - DNA, 120 bp, Homo sapiens; identical to SEQ ID NO: 51932
  misc_feature: 739 for SV(C|O) and mtDNA

SEQ ID NO: 70951 - DNA, 120 bp, Homo sapiens
  misc_feature: 739 for SV(C|O) and mtDNA
gtaggaagctgaataatttatgaaggagaggggtcagggttgattcgggaggatcctattggtgcgggggctttgtatgattatgggcgttgattagtagtagttactggttgaacattg

SEQ ID NO: 70952 - DNA, 120 bp, Homo sapiens
  misc_feature: 739 for SV(C|O) and mtDNA
acagcaaggactaacccctataccttctgcataatgaattaactagaaataactttgcaaggagagccaaagctaagacccccgaaaccagacgagctacctaagaacagctaaaagagc

SEQ ID NO: 70953 - DNA, 120 bp, Homo sapiens; identical to SEQ ID NO: 53861
  misc_feature: 739 for SV(C|O) and mtDNA

SEQ ID NO: 70954 - DNA, 120 bp, Homo sapiens
  misc_feature: 739 for SV(C|O) and mtDNA
caggcctcctagggagaggagggtggatggaattaagggtgttagtcatgttagcttgtttcaggtgcgagatagtagtagggtcgtggtgctggagtttaagttgagtagtaggaatgc

SEQ ID NO: 70955 - DNA, 120 bp, Homo sapiens
  misc_feature: 739 for SV(C|O) and mtDNA
gcataatgaattaactagaaataactttgcaaggagagccaaagctaagacccccgaaaccagacgagctacctaagaacagctaaaagagcacacccgtctatgtagcaaaatagtggg

SEQ ID NO: 70956 - DNA, 120 bp, Homo sapiens; identical to SEQ ID NO: 54072
  misc_feature: 739 for SV(C|O) and mtDNA

SEQ ID NO: 70957 - DNA, 120 bp, Homo sapiens
  misc_feature: 739 for SV(C|O) and mtDNA
gaatgttttcatgttacttatactaacattagttcttctatagggtgatagattggtccaattgggtgtgaggagttcagttatatgtttgggattttttaggtagtgggtgttgagctt

SEQ ID NO: 70958 - DNA, 120 bp, Homo sapiens; identical to SEQ ID NO: 59294
  misc_feature: 739 for SV(C|O) and mtDNA

SEQ ID NO: 70959 - DNA, 120 bp, Homo sapiens
  misc_feature: 739 for SV(C|O) and mtDNA
cttactgagggctttgaaggctcttggtctgtatttaacctaaatttctataagattattagtataaaaggggagataggtaggagtagcgtggtaagggcgatgagtgtggggaggaat

SEQ ID NO: 70960 - DNA, 120 bp, Homo sapiens
  misc_feature: 739 for SV(C|O) and mtDNA
ctgagccttttaccactccagcctagcccctaccccccaattaggagggcactggcccccaacaggcatcaccccgctaaatcccctagaagtcccactcctaaacacatccgtattact

SEQ ID NO: 70961 - DNA, 120 bp, Homo sapiens; identical to SEQ ID NO: 54701
  misc_feature: 739 for SV(C|O) and mtDNA

SEQ ID NO: 70962 - DNA, 120 bp, Homo sapiens; identical to SEQ ID NO: 52804
  misc_feature: 739 for SV(C|O) and mtDNA

SEQ ID NO: 70963 - DNA, 120 bp, Homo sapiens
  misc_feature: 739 for SV(C|O) and mtDNA
atggaccatgtaacgaataatgctacagggatgaatattatggagaagtagtctagtttgaagcttagggagagctgggttgtttgggttgtggctcagtgtcagttcgagataataact

SEQ ID NO: 70964 - DNA, 120 bp, Homo sapiens; identical to SEQ ID NO: 56960
  misc_feature: 739 for SV(C|O) and mtDNA

SEQ ID NO: 70965 - DNA, 120 bp, Homo sapiens
  misc_feature: 739 for SV(C|O) and mtDNA
agtagctataatgaacagtgatagtattattccttctaggcatagtagggaggatatgaggtgtgagcggtatactagtattcctagaagtgagatggtaaatgctagtataatatttat

SEQ ID NO: 70966 - DNA, 120 bp, Homo sapiens; identical to SEQ ID NO: 58726
  misc_feature: 738 for SV(C|O) and mtDNA

SEQ ID NO: 70967 - DNA, 120 bp, Homo sapiens; identical to SEQ ID NO: 59107
  misc_feature: 738 for SV(C|O) and mtDNA

SEQ ID NO: 70968 - DNA, 120 bp, Homo sapiens; identical to SEQ ID NO: 54718
  misc_feature: 738 for SV(C|O) and mtDNA

SEQ ID NO: 70969 - DNA, 120 bp, Homo sapiens
  misc_feature: 738 for SV(C|O) and mtDNA
tcaaaggacatttaactaaaacccctacgcatttatatagaggagacaagtcgtaacatggtaagtgtactggaaagtgcacttggacgaaccagagtgtagcttaacacaaagcaccca

SEQ ID NO: 70970 - DNA, 120 bp, Homo sapiens
  misc_feature: 738 for SV(C|O) and mtDNA
gtacattactgccagccaccatgaatattgtacggtaccataaatacttgaccacctgtagtacataaaaacccaatccacatcaaaaccccctccccatgcttacaagcaagtacagca

SEQ ID NO: 70971 - DNA, 120 bp, Homo sapiens
  misc_feature: 738 for SV(C|O) and mtDNA
gcgtatcatcaactgatgagcaagaaggatataattcctacgccctctcagccgatgaacagttggaataggttgttagcggtaactaagattagtatggtaattaggaagatgagtaga

SEQ ID NO: 70972 - DNA, 120 bp, Homo sapiens
  misc_feature: 738 for SV(C|O) and mtDNA
caaactgtcattttatttttacgttgttagatatggggagtagtgtgattgaggtggagtagattaggcgtaggtagaagtagaggttaaggagggtgatggtggctatgatggtgggga

SEQ ID NO: 70973 - DNA, 120 bp, Homo sapiens
  misc_feature: 738 for SV(C|O) and mtDNA
tcaccatttccgacggcatctacggctcaacattttttgtagccacaggcttccacggacttcacgtcattattggctcaactttcctcactatctgcttcatccgccaactaatatttc

SEQ ID NO: 70974 - DNA, 120 bp, Homo sapiens; identical to SEQ ID NO: 57866
  misc_feature: 738 for SV(C|O) and mtDNA

SEQ ID NO: 70975 - DNA, 120 bp, Homo sapiens; identical to SEQ ID NO: 55537
  misc_feature: 738 for SV(C|O) and mtDNA

SEQ ID NO: 70976 - DNA, 120 bp, Homo sapiens
  misc_feature: 738 for SV(C|O) and mtDNA
tagtccaaagaggaacagctctttggacactaggaaaaaaccttgtagagagagtaaaaaatttaacacccatagtaggcctaaaagcagccaccaattaagaaagcgttcaagctcaac

SEQ ID NO: 70977 - DNA, 120 bp, Homo sapiens; identical to SEQ ID NO: 52868
  misc_feature: 738 for SV(C|O) and mtDNA

SEQ ID NO: 70978 - DNA, 120 bp, Homo sapiens
  misc_feature: 738 for SV(C|O) and mtDNA
taggtttgttggtatcctagtgggtgaggggtggctttggagttgcagttgatgtgtgatagttgagggttgattgctgtacttgcttgtaagcatggggagggggttttgatgtggatt

SEQ ID NO: 70979 - DNA, 120 bp, Homo sapiens
  misc_feature: 738 for SV(C|O) and mtDNA
tactagcatttaccatctcacttctaggaatactagtataccgctcacacctcatatcctccctactatgcctagaaggaataatactatcactgttcattatagctactctcataaccc

SEQ ID NO: 70980 - DNA, 120 bp, Homo sapiens
  misc_feature: 738 for SV(C|O) and mtDNA
taatgctacagggatgaatattatggagaagtagtctagtttgaagcttagggagagctgggttgtttgggttgtggctcagtgtcagttcgagataataacttcttggtctaggcacat

SEQ ID NO: 70981 - DNA, 120 bp, Homo sapiens
  misc_feature: 738 for SV(C|O) and mtDNA
gtatggcccaccataattacccccatactccttacactattcctcatcacccaactaaaaatattaaacacaaactaccacctacctccctcaccaaagcccataaaaataaaaaattat

SEQ ID NO: 70982 - DNA, 120 bp, Homo sapiens
  misc_feature: 738 for SV(C|O) and mtDNA
gcaggcctcctagggagaggagggtggatggaattaagggtgttagtcatgttagcttgtttcaggtgcgagatagtagtagggtcgtggtgctggagtttaagttgagtagtaggaatg

SEQ ID NO: 70983 - DNA, 120 bp, Homo sapiens
  misc_feature: 738 for SV(C|O) and mtDNA
aaacctggcgcaatagatatagtaccgcaagggaaagatgaaaaattataaccaagcataatacagcaaggactaacccctataccttctgcataatgaattaactagaaataactttgc

SEQ ID NO: 70984 - DNA, 120 bp, Homo sapiens; identical to SEQ ID NO: 52025
  misc_feature: 738 for SV(C|O) and mtDNA

SEQ ID NO: 70985 - DNA, 120 bp, Homo sapiens
  misc_feature: 738 for SV(C|O) and mtDNA
cttccccacaacaatattcatgtgcctagaccaagaagttattatctcgaactgacactgagccacaacccaaacaacccagctctccctaagcttcaaactagactacttctccataat

SEQ ID NO: 70986 - DNA, 120 bp, Homo sapiens; identical to SEQ ID NO: 52827
  misc_feature: 738 for SV(C|O) and mtDNA

SEQ ID NO: 70987 - DNA, 120 bp, Homo sapiens
  misc_feature: 738 for SV(C|O) and mtDNA
ctaatggtggagttaaagactttttctctgatttgtccttggaaaaaggttttcatctccggtttacaagactggtgtattagtttatactacaaggacaggcccatttgagtattttgt

SEQ ID NO: 70988 - DNA, 120 bp, Homo sapiens; identical to SEQ ID NO: 57422
  misc_feature: 738 for SV(C|O) and mtDNA

SEQ ID NO: 70989 - DNA, 120 bp, Homo sapiens
  misc_feature: 738 for SV(C|O) and mtDNA
aatcacttgttccttaaatagggacctgtatgaatggctccacgagggttcagctgtctcttacttttaaccagtgaaattgacctgcccgtgaagaggcgggcatgacacagcaagacg

SEQ ID NO: 70990 - DNA, 120 bp, Homo sapiens
  misc_feature: 738 for SV(C|O) and mtDNA
attatttggtttcggttgttttctattagactatggtgagctcaggtgattgatactcctgatgcgagtaatacggatgtgtttaggagtgggacttctaggggatttagcggggtgatg

SEQ ID NO: 70991 - DNA, 120 bp, Homo sapiens; identical to SEQ ID NO: 55160
  misc_feature: 738 for SV(C|O) and mtDNA

SEQ ID NO: 70992 - DNA, 120 bp, Homo sapiens
  misc_feature: 738 for SV(C|O) and mtDNA
aaaaataaaccctcgttccacagaagctgccatcaagtatttcctcacgcaagcaaccgcatccataatccttctaatagctatcctcttcaacaatatactctccggacaatgaaccat

SEQ ID NO: 70993 - DNA, 120 bp, Homo sapiens; identical to SEQ ID NO: 53006
  misc_feature: 738 for SV(C|O) and mtDNA

SEQ ID NO: 70994 - DNA, 120 bp, Homo sapiens
  misc_feature: 738 for SV(C|O) and mtDNA
acactactccccatatctaacaacgtaaaaataaaatgacagtttgaacatacaaaacccaccccattcctccccacactcatcgcccttaccacgctactcctacctatctcccctttt

SEQ ID NO: 70995 - DNA, 120 bp, Homo sapiens
  misc_feature: 737 for SV(C|O) and mtDNA
ccccaccctaccacacattcgaagaacccgtatacataaaatctagacaaaaaaggaaggaatcgaaccccccaaagctggtttcaagccaaccccatggcctccatgactttttcaaaa

SEQ ID NO: 70996 - DNA, 120 bp, Homo sapiens
  misc_feature: 737 for SV(C|O) and mtDNA
ttttcatctttcccttgcggtactatatctattgcgccaggtttcaatttctatcgcctatactttatttgggtaaatggtttggctaaggttgtctggtagtaaggtggagtgggtttg

SEQ ID NO: 70997 - DNA, 120 bp, Homo sapiens
  misc_feature: 737 for SV(C|O) and mtDNA
cccccaccctaccacacattcgaagaacccgtatacataaaatctagacaaaaaaggaaggaatcgaaccccccaaagctggtttcaagccaaccccatggcctccatgactttttcaaa

SEQ ID NO: 70998 - DNA, 120 bp, Homo sapiens; identical to SEQ ID NO: 54339
  misc_feature: 737 for SV(C|O) and mtDNA

SEQ ID NO: 70999 - DNA, 120 bp, Homo sapiens; identical to SEQ ID NO: 55900
  misc_feature: 737 for SV(C|O) and mtDNA

SEQ ID NO: 71000 - DNA, 120 bp, Homo sapiens; identical to SEQ ID NO: 61166
  misc_feature: 737 for SV(C|O) and mtDNA

SEQ ID NO: 71001 - DNA, 120 bp, Homo sapiens; identical to SEQ ID NO: 52276
  misc_feature: 737 for SV(C|O) and mtDNA

SEQ ID NO: 71002 - DNA, 120 bp, Homo sapiens
  misc_feature: 737 for SV(C|O) and mtDNA
tctcccttcaccatttccgacggcatctacggctcaacattttttgtagccacaggcttccacggacttcacgtcattattggctcaactttcctcactatctgcttcatccgccaacta

SEQ ID NO: 71003 - DNA, 120 bp, Homo sapiens
  misc_feature: 737 for SV(C|O) and mtDNA
taggggcctacaacgttggggcctttgcgtagttgtatatagcctagaatttttcgttcggtaagcattaggaatgccattgcgattagaatgggtacaatgaggagtaggaggttggcc

SEQ ID NO: 71004 - DNA, 120 bp, Homo sapiens; identical to SEQ ID NO: 52253
  misc_feature: 737 for SV(C|O) and mtDNA

SEQ ID NO: 71005 - DNA, 120 bp, Homo sapiens; identical to SEQ ID NO: 56052
  misc_feature: 737 for SV(C|O) and mtDNA

SEQ ID NO: 71006 - DNA, 120 bp, Homo sapiens
  misc_feature: 737 for SV(C|O) and mtDNA
tagcattattcgttacatggtccatcatagaattctcactgtgatatataaactcagacccaaacattaatcagttcttcaaatatctactcatcttcctaattaccatactaatcttag

SEQ ID NO: 71007 - DNA, 120 bp, Homo sapiens
  misc_feature: 737 for SV(C|O) and mtDNA
taaaattaattaaccactcattcatcgacctccccaccccatccaacatctccgcatgatgaaacttcggctcactccttggcgcctgcctgatcctccaaatcaccacaggactattcc

SEQ ID NO: 71008 - DNA, 120 bp, Homo sapiens
  misc_feature: 737 for SV(C|O) and mtDNA
gtttgttggtatcctagtgggtgaggggtggctttggagttgcagttgatgtgtgatagttgagggttgattgctgtacttgcttgtaagcatggggagggggttttgatgtggattggg

SEQ ID NO: 71009 - DNA, 120 bp, Homo sapiens
  misc_feature: 737 for SV(C|O) and mtDNA
acatggtccatcatagaattctcactgtgatatataaactcagacccaaacattaatcagttcttcaaatatctactcatcttcctaattaccatactaatcttagttaccgctaacaac

SEQ ID NO: 71010 - DNA, 120 bp, Homo sapiens
  misc_feature: 737 for SV(C|O) and mtDNA
acactaaaggacgaacctgatctcttatactagtatccttaatcatttttattgccacaactaacctcctcggactcctgcctcactcatttacaccaaccacccaactatctataaacc

SEQ ID NO: 71011 - DNA, 120 bp, Homo sapiens; identical to SEQ ID NO: 60418
  misc_feature: 737 for SV(C|O) and mtDNA

SEQ ID NO: 71012 - DNA, 120 bp, Homo sapiens; identical to SEQ ID NO: 55521
  misc_feature: 737 for SV(C|O) and mtDNA

SEQ ID NO: 71013 - DNA, 120 bp, Homo sapiens
  misc_feature: 737 for SV(C|O) and mtDNA
gagccgtagatgccgtcggaaatggtgaagggagactcgaagtactctgaggcttgtaggagggtaaaatagagacccagtaaaattgtaataagcagtgcttgaattatttggtttcgg

SEQ ID NO: 71014 - DNA, 120 bp, Homo sapiens
  misc_feature: 737 for SV(C|O) and mtDNA
agaatcttagctttgggtgctaatggtggagttaaagactttttctctgatttgtccttggaaaaaggttttcatctccggtttacaagactggtgtattagtttatactacaaggacag

SEQ ID NO: 71015 - DNA, 120 bp, Homo sapiens; identical to SEQ ID NO: 57649
  misc_feature: 737 for SV(C|O) and mtDNA

SEQ ID NO: 71016 - DNA, 120 bp, Homo sapiens; identical to SEQ ID NO: 52416
  misc_feature: 737 for SV(C|O) and mtDNA

SEQ ID NO: 71017 - DNA, 120 bp, Homo sapiens
  misc_feature: 737 for SV(C|O) and mtDNA
agcataatacagcaaggactaacccctataccttctgcataatgaattaactagaaataactttgcaaggagagccaaagctaagacccccgaaaccagacgagctacctaagaacagct

SEQ ID NO: 71018 - DNA, 120 bp, Homo sapiens
  misc_feature: 737 for SV(C|O) and mtDNA
aataggaagtatgtgcctgcgttcaggcgttctggctggttgcctcatcgggtgatgatagccaaggtggggataagtgtggtttcgaagaagatataaaatatgattagttctgtggct

SEQ ID NO: 71019 - DNA, 120 bp, Homo sapiens; identical to SEQ ID NO: 52427
  misc_feature: 737 for SV(C|O) and mtDNA

SEQ ID NO: 71020 - DNA, 120 bp, Homo sapiens
  misc_feature: 736 for SV(C|O) and mtDNA
taaattaaaaaaactattaaacccatataacctcccccaaaattcagaataataacacacccgaccacaccgctaacaatcaatactaaacccccataaataggagaaggcttagaagaa

SEQ ID NO: 71021 - DNA, 120 bp, Homo sapiens
  misc_feature: 736 for SV(C|O) and mtDNA
gggcactggcccccaacaggcatcaccccgctaaatcccctagaagtcccactcctaaacacatccgtattactcgcatcaggagtatcaatcacctgagctcaccatagtctaatagaa

SEQ ID NO: 71022 - DNA, 120 bp, Homo sapiens
  misc_feature: 736 for SV(C|O) and mtDNA
cataatacagcaaggactaacccctataccttctgcataatgaattaactagaaataactttgcaaggagagccaaagctaagacccccgaaaccagacgagctacctaagaacagctaa

SEQ ID NO: 71023 - DNA, 120 bp, Homo sapiens
  misc_feature: 736 for SV(C|O) and mtDNA
catttaccatctcacttctaggaatactagtataccgctcacacctcatatcctccctactatgcctagaaggaataatactatcactgttcattatagctactctcataaccctcaaca

SEQ ID NO: 71024 - DNA, 120 bp, Homo sapiens; identical to SEQ ID NO: 53243
  misc_feature: 736 for SV(C|O) and mtDNA

SEQ ID NO: 71025 - DNA, 120 bp, Homo sapiens
  misc_feature: 736 for SV(C|O) and mtDNA
aaggacgaacctgatctcttatactagtatccttaatcatttttattgccacaactaacctcctcggactcctgcctcactcatttacaccaaccacccaactatctataaacctagcca

SEQ ID NO: 71026 - DNA, 120 bp, Homo sapiens
  misc_feature: 736 for SV(C|O) and mtDNA
gccatcaagtatttcctcacgcaagcaaccgcatccataatccttctaatagctatcctcttcaacaatatactctccggacaatgaaccataaccaatactaccaatcaatactcatca

SEQ ID NO: 71027 - DNA, 120 bp, Homo sapiens
  misc_feature: 736 for SV(C|O) and mtDNA
acaaatcagagaaaaagtctttaactccaccattagcacccaaagctaagattctaatttaaactattctctgttctttcatggggaagcagatttgggtgccacccaagtattgactca

SEQ ID NO: 71028 - DNA, 120 bp, Homo sapiens
  misc_feature: 736 for SV(C|O) and mtDNA
tgaaggagaggggtcagggttgattcgggaggatcctattggtgcgggggctttgtatgattatgggcgttgattagtagtagttactggttgaacattgtttgttggtgtatatattgt

SEQ ID NO: 71029 - DNA, 120 bp, Homo sapiens
  misc_feature: 736 for SV(C|O) and mtDNA
cccctacgcatttatatagaggagacaagtcgtaacatggtaagtgtactggaaagtgcacttggacgaaccagagtgtagcttaacacaaagcacccaacttacacttaggagatttca

SEQ ID NO: 71030 - DNA, 120 bp, Homo sapiens
  misc_feature: 736 for SV(C|O) and mtDNA
ctccctgtacgaaaggacaagagaaataaggcctacttcacaaagcgccttcccccgtaaatgatatcatctcaacttagtattatacccacacccacccaagaacagggtttgttaaga

SEQ ID NO: 71031 - DNA, 120 bp, Homo sapiens
  misc_feature: 736 for SV(C|O) and mtDNA
tcgttcggtaagcattaggaatgccattgcgattagaatgggtacaatgaggagtaggaggttggccatgggtatgttgttaagaagaggaattgaacctctgactgtaaagttttaagt

SEQ ID NO: 71032 - DNA, 120 bp, Homo sapiens
  misc_feature: 736 for SV(C|O) and mtDNA
atattgaacgtaggtgcgataaataataggatgaggcaggaatcaaagacagatactgcgacatagggtgctccggctccagcgtctcgcaatgctatcgcgtgcacaccccccagacga

SEQ ID NO: 71033 - DNA, 120 bp, Homo sapiens
  misc_feature: 736 for SV(C|O) and mtDNA
tcgaagaacccgtatacataaaatctagacaaaaaaggaaggaatcgaaccccccaaagctggtttcaagccaaccccatggcctccatgactttttcaaaaaggtattagaaaaaccat

SEQ ID NO: 71034 - DNA, 120 bp, Homo sapiens
  misc_feature: 736 for SV(C|O) and mtDNA
tccctgtacgaaaggacaagagaaataaggcctacttcacaaagcgccttcccccgtaaatgatatcatctcaacttagtattatacccacacccacccaagaacagggtttgttaagat

SEQ ID NO: 71035 - DNA, 120 bp, Homo sapiens
  misc_feature: 736 for SV(C|O) and mtDNA
tatgtaaaatccattgtcgcatccacctttattatcagtctcttccccacaacaatattcatgtgcctagaccaagaagttattatctcgaactgacactgagccacaacccaaacaacc

SEQ ID NO: 71036 - DNA, 120 bp, Homo sapiens; identical to SEQ ID NO: 52818
  misc_feature: 736 for SV(C|O) and mtDNA

SEQ ID NO: 71037 - DNA, 120 bp, Homo sapiens
  misc_feature: 736 for SV(C|O) and mtDNA
tagatcaaataataagaaggtaatagctactaagaagaattttatggagaaagggacgcgggcgggggatatagggtcgaagccgcactcgtaaggggtggatttttctatgtagccgtt

SEQ ID NO: 71038 - DNA, 120 bp, Homo sapiens; identical to SEQ ID NO: 52819
  misc_feature: 736 for SV(C|O) and mtDNA

SEQ ID NO: 71039 - DNA, 120 bp, Homo sapiens; identical to SEQ ID NO: 56908
  misc_feature: 736 for SV(C|O) and mtDNA

SEQ ID NO: 71040 - DNA, 120 bp, Homo sapiens
  misc_feature: 736 for SV(C|O) and mtDNA
taataattaggctgtgggtggttgtgttgattcaaattatgtgttttttggaaagtcatgtcagtggtagtaatataattgttgggacgattagttttagcattggagtaggtttaggtt

SEQ ID NO: 71041 - DNA, 120 bp, Homo sapiens
  misc_feature: 736 for SV(C|O) and mtDNA
cactactccccatatctaacaacgtaaaaataaaatgacagtttgaacatacaaaacccaccccattcctccccacactcatcgcccttaccacgctactcctacctatctcccctttta

SEQ ID NO: 71042 - DNA, 120 bp, Homo sapiens; identical to SEQ ID NO: 59093
  misc_feature: 736 for SV(C|O) and mtDNA

SEQ ID NO: 71043 - DNA, 120 bp, Homo sapiens
  misc_feature: 736 for SV(C|O) and mtDNA
aacactaaaggacgaacctgatctcttatactagtatccttaatcatttttattgccacaactaacctcctcggactcctgcctcactcatttacaccaaccacccaactatctataaac

SEQ ID NO: 71044 - DNA, 120 bp, Homo sapiens
  misc_feature: 736 for SV(C|O) and mtDNA
gatggaccatgtaacgaataatgctacagggatgaatattatggagaagtagtctagtttgaagcttagggagagctgggttgtttgggttgtggctcagtgtcagttcgagataataac

SEQ ID NO: 71045 - DNA, 120 bp, Homo sapiens
  misc_feature: 736 for SV(C|O) and mtDNA
gtctgtaatattgaacgtaggtgcgataaataataggatgaggcaggaatcaaagacagatactgcgacatagggtgctccggctccagcgtctcgcaatgctatcgcgtgcacaccccc

SEQ ID NO: 71046 - DNA, 120 bp, Homo sapiens
  misc_feature: 736 for SV(C|O) and mtDNA
ctgataaaagagttactttgatagagtaaataataggagcttaaacccccttatttctaggactatgagaatcgaacccatccctgagaatccaaaattctccgtgccacctatcacacc

SEQ ID NO: 71047 - DNA, 120 bp, Homo sapiens
  misc_feature: 736 for SV(C|O) and mtDNA
ggggcctacaacgttggggcctttgcgtagttgtatatagcctagaatttttcgttcggtaagcattaggaatgccattgcgattagaatgggtacaatgaggagtaggaggttggccat

SEQ ID NO: 71048 - DNA, 120 bp, Homo sapiens
  misc_feature: 736 for SV(C|O) and mtDNA
gggcgaaatattatgctttgttgtttggatatatggaggatggggattattgctaggatgaggatggatagtaatagggcaaggacgcctcctagtttgttagggacggatcggagaatt

SEQ ID NO: 71049 - DNA, 120 bp, Homo sapiens
  misc_feature: 736 for SV(C|O) and mtDNA
ctgtacgaaaggacaagagaaataaggcctacttcacaaagcgccttcccccgtaaatgatatcatctcaacttagtattatacccacacccacccaagaacagggtttgttaagatggc

SEQ ID NO: 71050 - DNA, 120 bp, Homo sapiens; identical to SEQ ID NO: 52559
  misc_feature: 736 for SV(C|O) and mtDNA

SEQ ID NO: 71051 - DNA, 120 bp, Homo sapiens
  misc_feature: 736 for SV(C|O) and mtDNA
gacatatttcttaggtttgagggggaatgctggagattgtaatgggtatggagacatatcatataagtaatgctagggtgagtggtaggaagttttttcataggaggtgtatgagttggt

SEQ ID NO: 71052 - DNA, 120 bp, Homo sapiens; identical to SEQ ID NO: 56328
  misc_feature: 736 for SV(C|O) and mtDNA

SEQ ID NO: 71053 - DNA, 120 bp, Homo sapiens
  misc_feature: 736 for SV(C|O) and mtDNA
ctttgaaggctcttggtctgtatttaacctaaatttctataagattattagtataaaaggggagataggtaggagtagcgtggtaagggcgatgagtgtggggaggaatggggtgggttt

SEQ ID NO: 71054 - DNA, 120 bp, Homo sapiens
  misc_feature: 736 for SV(C|O) and mtDNA
cttagccaaaccatttacccaaataaagtataggcgatagaaattgaaacctggcgcaatagatatagtaccgcaagggaaagatgaaaaattataaccaagcataatacagcaaggact

SEQ ID NO: 71055 - DNA, 120 bp, Homo sapiens
  misc_feature: 736 for SV(C|O) and mtDNA
atagagtaaataataggagcttaaacccccttatttctaggactatgagaatcgaacccatccctgagaatccaaaattctccgtgccacctatcacaccccatcctaaagtaaggtcag

SEQ ID NO: 71056 - DNA, 120 bp, Homo sapiens
  misc_feature: 736 for SV(C|O) and mtDNA
agtccgtaaagaggtatctttactataaaagctattgtgtaagctagtcatattaagttgttggctcaggagtttgatagttcttgggcagtgagagtgagtagtagaatgtttagtgag

SEQ ID NO: 71057 - DNA, 120 bp, Homo sapiens; identical to SEQ ID NO: 51793
  misc_feature: 736 for SV(C|O) and mtDNA

SEQ ID NO: 71058 - DNA, 120 bp, Homo sapiens; identical to SEQ ID NO: 57619
  misc_feature: 736 for SV(C|O) and mtDNA

SEQ ID NO: 71059 - DNA, 120 bp, Homo sapiens
  misc_feature: 736 for SV(C|O) and mtDNA
atttatgaaggagaggggtcagggttgattcgggaggatcctattggtgcgggggctttgtatgattatgggcgttgattagtagtagttactggttgaacattgtttgttggtgtatat

SEQ ID NO: 71060 - DNA, 120 bp, Homo sapiens
  misc_feature: 736 for SV(C|O) and mtDNA
aataggttgttgttgatttggttaaaaaatagtagagggatgatgctaataattaggctgtgggtggttgtgttgattcaaattatgtgttttttggaaagtcatgtcagtggtagtaat

SEQ ID NO: 71061 - DNA, 120 bp, Homo sapiens
  misc_feature: 736 for SV(C|O) and mtDNA
ataattaggctgtgggtggttgtgttgattcaaattatgtgttttttggaaagtcatgtcagtggtagtaatataattgttgggacgattagttttagcattggagtaggtttaggttat

SEQ ID NO: 71062 - DNA, 120 bp, Homo sapiens; identical to SEQ ID NO: 55822
  misc_feature: 736 for SV(C|O) and mtDNA

SEQ ID NO: 71063 - DNA, 120 bp, Homo sapiens
  misc_feature: 735 for SV(C|O) and mtDNA
gggggcatccatatagtcactccaggtttatggagggttcttctactattaggacttttcgcttcgaagcgaaggcttctcaaatcatgaaaattattaatattactgctgttagagaaa

SEQ ID NO: 71064 - DNA, 120 bp, Homo sapiens; identical to SEQ ID NO: 60371
  misc_feature: 735 for SV(C|O) and mtDNA

SEQ ID NO: 71065 - DNA, 120 bp, Homo sapiens; identical to SEQ ID NO: 55080
  misc_feature: 735 for SV(C|O) and mtDNA

SEQ ID NO: 71066 - DNA, 120 bp, Homo sapiens
  misc_feature: 735 for SV(C|O) and mtDNA
atactcggattctaccctaccatcacacaccgcacaatcccctatctaggccttcttacgagccaaaacctgcccctactcctcctagacctaacctgactagaaaagctattacctaaa

SEQ ID NO: 71067 - DNA, 120 bp, Homo sapiens
  misc_feature: 735 for SV(C|O) and mtDNA
agagtaaaaaatttaacacccatagtaggcctaaaagcagccaccaattaagaaagcgttcaagctcaacacccactacctaaaaaatcccaaacatataactgaactcctcacacccaa

SEQ ID NO: 71068 - DNA, 120 bp, Homo sapiens
  misc_feature: 735 for SV(C|O) and mtDNA
tgatggaccatgtaacgaataatgctacagggatgaatattatggagaagtagtctagtttgaagcttagggagagctgggttgtttgggttgtggctcagtgtcagttcgagataataa

SEQ ID NO: 71069 - DNA, 120 bp, Homo sapiens; identical to SEQ ID NO: 60207
  misc_feature: 735 for SV(C|O) and mtDNA

SEQ ID NO: 71070 - DNA, 120 bp, Homo sapiens
  misc_feature: 735 for SV(C|O) and mtDNA
ttatgtaaaatccattgtcgcatccacctttattatcagtctcttccccacaacaatattcatgtgcctagaccaagaagttattatctcgaactgacactgagccacaacccaaacaac

SEQ ID NO: 71071 - DNA, 120 bp, Homo sapiens; identical to SEQ ID NO: 58678
  misc_feature: 735 for SV(C|O) and mtDNA

SEQ ID NO: 71072 - DNA, 120 bp, Homo sapiens
  misc_feature: 735 for SV(C|O) and mtDNA
tgtgctatgtacggtaaatggctttatgtactatgtgctgttaagggtgagtaggtttgttggtatcctagtgggtgaggggtggctttggagttgcagttgatgtgtgatagttgaggg

SEQ ID NO: 71073 - DNA, 120 bp, Homo sapiens; identical to SEQ ID NO: 51884
  misc_feature: 735 for SV(C|O) and mtDNA

SEQ ID NO: 71074 - DNA, 120 bp, Homo sapiens
  misc_feature: 735 for SV(C|O) and mtDNA
gaacctgatctcttatactagtatccttaatcatttttattgccacaactaacctcctcggactcctgcctcactcatttacaccaaccacccaactatctataaacctagccatggcca

SEQ ID NO: 71075 - DNA, 120 bp, Homo sapiens; identical to SEQ ID NO: 53826
  misc_feature: 735 for SV(C|O) and mtDNA

SEQ ID NO: 71076 - DNA, 120 bp, Homo sapiens
  misc_feature: 735 for SV(C|O) and mtDNA
tgagggctttgaaggctcttggtctgtatttaacctaaatttctataagattattagtataaaaggggagataggtaggagtagcgtggtaagggcgatgagtgtggggaggaatggggt

SEQ ID NO: 71077 - DNA, 120 bp, Homo sapiens
  misc_feature: 735 for SV(C|O) and mtDNA
tccgtaaagaggtatctttactataaaagctattgtgtaagctagtcatattaagttgttggctcaggagtttgatagttcttgggcagtgagagtgagtagtagaatgtttagtgagcc

SEQ ID NO: 71078 - DNA, 120 bp, Homo sapiens
  misc_feature: 735 for SV(C|O) and mtDNA
tccctagggtaacttgttccgttggtcaagttattggatcaattgagtatagtagttcgctttgactggtgaagtcttagcatgtactgctcggaggttgggttctgctccgaggtcgcc

SEQ ID NO: 71079 - DNA, 120 bp, Homo sapiens
  misc_feature: 735 for SV(C|O) and mtDNA
gagtccgtaaagaggtatctttactataaaagctattgtgtaagctagtcatattaagttgttggctcaggagtttgatagttcttgggcagtgagagtgagtagtagaatgtttagtga

SEQ ID NO: 71080 - DNA, 120 bp, Homo sapiens; identical to SEQ ID NO: 54659
  misc_feature: 735 for SV(C|O) and mtDNA

SEQ ID NO: 71081 - DNA, 120 bp, Homo sapiens; identical to SEQ ID NO: 55808
  misc_feature: 735 for SV(C|O) and mtDNA

SEQ ID NO: 71082 - DNA, 120 bp, Homo sapiens
  misc_feature: 735 for SV(C|O) and mtDNA
actcggattctaccctaccatcacacaccgcacaatcccctatctaggccttcttacgagccaaaacctgcccctactcctcctagacctaacctgactagaaaagctattacctaaaac

SEQ ID NO: 71083 - DNA, 120 bp, Homo sapiens
  misc_feature: 735 for SV(C|O) and mtDNA
gcatttaccatctcacttctaggaatactagtataccgctcacacctcatatcctccctactatgcctagaaggaataatactatcactgttcattatagctactctcataaccctcaac

SEQ ID NO: 71084 - DNA, 120 bp, Homo sapiens
  misc_feature: 735 for SV(C|O) and mtDNA
cctacgcatttatatagaggagacaagtcgtaacatggtaagtgtactggaaagtgcacttggacgaaccagagtgtagcttaacacaaagcacccaacttacacttaggagatttcaac

SEQ ID NO: 71085 - DNA, 120 bp, Homo sapiens
  misc_feature: 735 for SV(C|O) and mtDNA
aaaggacgaacctgatctcttatactagtatccttaatcatttttattgccacaactaacctcctcggactcctgcctcactcatttacaccaaccacccaactatctataaacctagcc

SEQ ID NO: 71086 - DNA, 120 bp, Homo sapiens
  misc_feature: 735 for SV(C|O) and mtDNA
gctttgaaggctcttggtctgtatttaacctaaatttctataagattattagtataaaaggggagataggtaggagtagcgtggtaagggcgatgagtgtggggaggaatggggtgggtt

SEQ ID NO: 71087 - DNA, 120 bp, Homo sapiens; identical to SEQ ID NO: 55600
  misc_feature: 735 for SV(C|O) and mtDNA

SEQ ID NO: 71088 - DNA, 120 bp, Homo sapiens; identical to SEQ ID NO: 52297
  misc_feature: 735 for SV(C|O) and mtDNA

SEQ ID NO: 71089 - DNA, 120 bp, Homo sapiens; identical to SEQ ID NO: 53290
  misc_feature: 735 for SV(C|O) and mtDNA

SEQ ID NO: 71090 - DNA, 120 bp, Homo sapiens
  misc_feature: 735 for SV(C|O) and mtDNA
gatgccccccaccctaccacacattcgaagaacccgtatacataaaatctagacaaaaaaggaaggaatcgaaccccccaaagctggtttcaagccaaccccatggcctccatgactttt

SEQ ID NO: 71091 - DNA, 120 bp, Homo sapiens
  misc_feature: 735 for SV(C|O) and mtDNA
gagaattctatgatggaccatgtaacgaataatgctacagggatgaatattatggagaagtagtctagtttgaagcttagggagagctgggttgtttgggttgtggctcagtgtcagttc

SEQ ID NO: 71092 - DNA, 120 bp, Homo sapiens
  misc_feature: 735 for SV(C|O) and mtDNA
acccctacgcatttatatagaggagacaagtcgtaacatggtaagtgtactggaaagtgcacttggacgaaccagagtgtagcttaacacaaagcacccaacttacacttaggagatttc

SEQ ID NO: 71093 - DNA, 120 bp, Homo sapiens; identical to SEQ ID NO: 60605
  misc_feature: 735 for SV(C|O) and mtDNA

SEQ ID NO: 71094 - DNA, 120 bp, Homo sapiens
  misc_feature: 735 for SV(C|O) and mtDNA
ctaaaggacgaacctgatctcttatactagtatccttaatcatttttattgccacaactaacctcctcggactcctgcctcactcatttacaccaaccacccaactatctataaacctag

SEQ ID NO: 71095 - DNA, 120 bp, Homo sapiens
  misc_feature: 735 for SV(C|O) and mtDNA
cgggggaaggcgctttgtgaagtaggccttatttctcttgtcctttcgtacagggaggaatttgaagtagatagaaaccgacctggattactccggtctgaactcagatcacgtaggact

SEQ ID NO: 71096 - DNA, 120 bp, Homo sapiens
  misc_feature: 735 for SV(C|O) and mtDNA
ccgtatcgaaggcctttttggacaggtggtgtgtggtggccttggtatgtgctttctcgtgttacatcgcgccatcattggtatatggttagtgtgttggttagtaggcctagtatgagg

SEQ ID NO: 71097 - DNA, 120 bp, Homo sapiens
  misc_feature: 735 for SV(C|O) and mtDNA
atgtgctatgtacggtaaatggctttatgtactatgtgctgttaagggtgagtaggtttgttggtatcctagtgggtgaggggtggctttggagttgcagttgatgtgtgatagttgagg

SEQ ID NO: 71098 - DNA, 120 bp, Homo sapiens
  misc_feature: 735 for SV(C|O) and mtDNA
attagtataaaaggggagataggtaggagtagcgtggtaagggcgatgagtgtggggaggaatggggtgggttttgtatgttcaaactgtcattttatttttacgttgttagatatgggg

SEQ ID NO: 71099 - DNA, 120 bp, Homo sapiens
  misc_feature: 735 for SV(C|O) and mtDNA
cccacttcttaccacaaggcacacctacaccccttatccccatactagttattatcgaaaccatcagcctactcattcaaccaatagccctggccgtacgcctaaccgctaacattactg

SEQ ID NO: 71100 - DNA, 120 bp, Homo sapiens
  misc_feature: 735 for SV(C|O) and mtDNA
agacatatttcttaggtttgagggggaatgctggagattgtaatgggtatggagacatatcatataagtaatgctagggtgagtggtaggaagttttttcataggaggtgtatgagttgg

SEQ ID NO: 71101 - DNA, 120 bp, Homo sapiens
  misc_feature: 735 for SV(C|O) and mtDNA
cattgtcgcatccacctttattatcagtctcttccccacaacaatattcatgtgcctagaccaagaagttattatctcgaactgacactgagccacaacccaaacaacccagctctccct

SEQ ID NO: 71102 - DNA, 120 bp, Homo sapiens; identical to SEQ ID NO: 52125
  misc_feature: 735 for SV(C|O) and mtDNA

SEQ ID NO: 71103 - DNA, 120 bp, Homo sapiens
  misc_feature: 735 for SV(C|O) and mtDNA
attaggaagatgagtagatatttgaagaactgattaatgtttgggtctgagtttatatatcacagtgagaattctatgatggaccatgtaacgaataatgctacagggatgaatattatg

SEQ ID NO: 71104 - DNA, 120 bp, Homo sapiens
  misc_feature: 735 for SV(C|O) and mtDNA
aggtttgttggtatcctagtgggtgaggggtggctttggagttgcagttgatgtgtgatagttgagggttgattgctgtacttgcttgtaagcatggggagggggttttgatgtggattg

SEQ ID NO: 71105 - DNA, 120 bp, Homo sapiens
  misc_feature: 735 for SV(C|O) and mtDNA
aatgttttcatgttacttatactaacattagttcttctatagggtgatagattggtccaattgggtgtgaggagttcagttatatgtttgggattttttaggtagtgggtgttgagcttg

SEQ ID NO: 71106 - DNA, 120 bp, Homo sapiens; identical to SEQ ID NO: 53774
  misc_feature: 735 for SV(C|O) and mtDNA

SEQ ID NO: 71107 - DNA, 120 bp, Homo sapiens; identical to SEQ ID NO: 60612
  misc_feature: 735 for SV(C|O) and mtDNA

SEQ ID NO: 71108 - DNA, 120 bp, Homo sapiens
  misc_feature: 735 for SV(C|O) and mtDNA
aggaagctgaataatttatgaaggagaggggtcagggttgattcgggaggatcctattggtgcgggggctttgtatgattatgggcgttgattagtagtagttactggttgaacattgtt

SEQ ID NO: 71109 - DNA, 120 bp, Homo sapiens
  misc_feature: 734 for SV(C|O) and mtDNA
taaatactaccgtatggcccaccataattacccccatactccttacactattcctcatcacccaactaaaaatattaaacacaaactaccacctacctccctcaccaaagcccataaaaa

SEQ ID NO: 71110 - DNA, 120 bp, Homo sapiens
  misc_feature: 734 for SV(C|O) and mtDNA
tttgttggtatcctagtgggtgaggggtggctttggagttgcagttgatgtgtgatagttgagggttgattgctgtacttgcttgtaagcatggggagggggttttgatgtggattgggt

SEQ ID NO: 71111 - DNA, 120 bp, Homo sapiens
  misc_feature: 734 for SV(C|O) and mtDNA
tttaaacaaaacgaatgatttcgactcattaaattatgataatcatatttaccaaatgcccctcatttacataaatattatactagcatttaccatctcacttctaggaatactagtata

SEQ ID NO: 71112 - DNA, 120 bp, Homo sapiens
  misc_feature: 734 for SV(C|O) and mtDNA
ccctacgcatttatatagaggagacaagtcgtaacatggtaagtgtactggaaagtgcacttggacgaaccagagtgtagcttaacacaaagcacccaacttacacttaggagatttcaa

SEQ ID NO: 71113 - DNA, 120 bp, Homo sapiens
  misc_feature: 734 for SV(C|O) and mtDNA
ttcgaagaacccgtatacataaaatctagacaaaaaaggaaggaatcgaaccccccaaagctggtttcaagccaaccccatggcctccatgactttttcaaaaaggtattagaaaaacca

SEQ ID NO: 71114 - DNA, 120 bp, Homo sapiens; identical to SEQ ID NO: 55185
  misc_feature: 734 for SV(C|O) and mtDNA

SEQ ID NO: 71115 - DNA, 120 bp, Homo sapiens; identical to SEQ ID NO: 54810
  misc_feature: 734 for SV(C|O) and mtDNA

SEQ ID NO: 71116 - DNA, 120 bp, Homo sapiens
  misc_feature: 734 for SV(C|O) and mtDNA
tatttattacctcagaagtttttttcttcgcaggatttttctgagccttttaccactccagcctagcccctaccccccaattaggagggcactggcccccaacaggcatcaccccgctaa

SEQ ID NO: 71117 - DNA, 120 bp, Homo sapiens
  misc_feature: 734 for SV(C|O) and mtDNA
cccccaattaggagggcactggcccccaacaggcatcaccccgctaaatcccctagaagtcccactcctaaacacatccgtattactcgcatcaggagtatcaatcacctgagctcacca

SEQ ID NO: 71118 - DNA, 120 bp, Homo sapiens; identical to SEQ ID NO: 55743
  misc_feature: 734 for SV(C|O) and mtDNA

SEQ ID NO: 71119 - DNA, 120 bp, Homo sapiens
  misc_feature: 734 for SV(C|O) and mtDNA
tgagccttttaccactccagcctagcccctaccccccaattaggagggcactggcccccaacaggcatcaccccgctaaatcccctagaagtcccactcctaaacacatccgtattactc

SEQ ID NO: 71120 - DNA, 120 bp, Homo sapiens
  misc_feature: 734 for SV(C|O) and mtDNA
tgagaattctatgatggaccatgtaacgaataatgctacagggatgaatattatggagaagtagtctagtttgaagcttagggagagctgggttgtttgggttgtggctcagtgtcagtt

SEQ ID NO: 71121 - DNA, 120 bp, Homo sapiens; identical to SEQ ID NO: 60458
  misc_feature: 734 for SV(C|O) and mtDNA

SEQ ID NO: 71122 - DNA, 120 bp, Homo sapiens
  misc_feature: 734 for SV(C|O) and mtDNA
gttagacatgggggcatgagttagcagttcttgtgagctttctcggtaaataaggggtcgtaagcctctgttgtcagattcacaatctgatgttttggttaaactatatttacaagagga

SEQ ID NO: 71123 - DNA, 120 bp, Homo sapiens; identical to SEQ ID NO: 53782
  misc_feature: 734 for SV(C|O) and mtDNA

SEQ ID NO: 71124 - DNA, 120 bp, Homo sapiens
  misc_feature: 734 for SV(C|O) and mtDNA
tcacactactccccatatctaacaacgtaaaaataaaatgacagtttgaacatacaaaacccaccccattcctccccacactcatcgcccttaccacgctactcctacctatctcccctt

SEQ ID NO: 71125 - DNA, 120 bp, Homo sapiens
  misc_feature: 734 for SV(C|O) and mtDNA
tattagtataaaaggggagataggtaggagtagcgtggtaagggcgatgagtgtggggaggaatggggtgggttttgtatgttcaaactgtcattttatttttacgttgttagatatggg

SEQ ID NO: 71126 - DNA, 120 bp, Homo sapiens
  misc_feature: 734 for SV(C|O) and mtDNA
cccactaagccaatcactttattgactcctagccgcagacctcctcattctaacctgaatcggaggacaaccagtaagctacccttttaccatcattggacaagtagcatccgtactata

SEQ ID NO: 71127 - DNA, 120 bp, Homo sapiens
  misc_feature: 734 for SV(C|O) and mtDNA
tataaaaggggagataggtaggagtagcgtggtaagggcgatgagtgtggggaggaatggggtgggttttgtatgttcaaactgtcattttatttttacgttgttagatatggggagtag

SEQ ID NO: 71128 - DNA, 120 bp, Homo sapiens; identical to SEQ ID NO: 55669
  misc_feature: 734 for SV(C|O) and mtDNA

SEQ ID NO: 71129 - DNA, 120 bp, Homo sapiens; identical to SEQ ID NO: 55194
  misc_feature: 734 for SV(C|O) and mtDNA

SEQ ID NO: 71130 - DNA, 120 bp, Homo sapiens; identical to SEQ ID NO: 59404
  misc_feature: 734 for SV(C|O) and mtDNA

SEQ ID NO: 71131 - DNA, 120 bp, Homo sapiens; identical to SEQ ID NO: 59687
  misc_feature: 734 for SV(C|O) and mtDNA

SEQ ID NO: 71132 - DNA, 120 bp, Homo sapiens; identical to SEQ ID NO: 53185
  misc_feature: 734 for SV(C|O) and mtDNA

SEQ ID NO: 71133 - DNA, 120 bp, Homo sapiens; identical to SEQ ID NO: 58712
  misc_feature: 734 for SV(C|O) and mtDNA

SEQ ID NO: 71134 - DNA, 120 bp, Homo sapiens; identical to SEQ ID NO: 54040
  misc_feature: 734 for SV(C|O) and mtDNA

SEQ ID NO: 71135 - DNA, 120 bp, Homo sapiens
  misc_feature: 734 for SV(C|O) and mtDNA
gttcaaactgtcattttatttttacgttgttagatatggggagtagtgtgattgaggtggagtagattaggcgtaggtagaagtagaggttaaggagggtgatggtggctatgatggtgg

SEQ ID NO: 71136 - DNA, 120 bp, Homo sapiens; identical to SEQ ID NO: 51941
  misc_feature: 734 for SV(C|O) and mtDNA

SEQ ID NO: 71137 - DNA, 120 bp, Homo sapiens
  misc_feature: 734 for SV(C|O) and mtDNA
gggggcaggcctcctagggagaggagggtggatggaattaagggtgttagtcatgttagcttgtttcaggtgcgagatagtagtagggtcgtggtgctggagtttaagttgagtagtagg

SEQ ID NO: 71138 - DNA, 120 bp, Homo sapiens
  misc_feature: 734 for SV(C|O) and mtDNA
aagcataatacagcaaggactaacccctataccttctgcataatgaattaactagaaataactttgcaaggagagccaaagctaagacccccgaaaccagacgagctacctaagaacagc

SEQ ID NO: 71139 - DNA, 120 bp, Homo sapiens; identical to SEQ ID NO: 60650
  misc_feature: 734 for SV(C|O) and mtDNA

SEQ ID NO: 71140 - DNA, 120 bp, Homo sapiens; identical to SEQ ID NO: 57674
  misc_feature: 734 for SV(C|O) and mtDNA

SEQ ID NO: 71141 - DNA, 120 bp, Homo sapiens; identical to SEQ ID NO: 52506
  misc_feature: 734 for SV(C|O) and mtDNA

SEQ ID NO: 71142 - DNA, 120 bp, Homo sapiens
  misc_feature: 734 for SV(C|O) and mtDNA
cataatcacttgttccttaaatagggacctgtatgaatggctccacgagggttcagctgtctcttacttttaaccagtgaaattgacctgcccgtgaagaggcgggcatgacacagcaag

SEQ ID NO: 71143 - DNA, 120 bp, Homo sapiens
  misc_feature: 734 for SV(C|O) and mtDNA
ctggctggttgcctcatcgggtgatgatagccaaggtggggataagtgtggtttcgaagaagatataaaatatgattagttctgtggctgtgaatgttataattaaggagatttgtaggg

SEQ ID NO: 71144 - DNA, 120 bp, Homo sapiens
  misc_feature: 734 for SV(C|O) and mtDNA
ctacttctccataatattcatccctgtagcattattcgttacatggtccatcatagaattctcactgtgatatataaactcagacccaaacattaatcagttcttcaaatatctactcat

SEQ ID NO: 71145 - DNA, 120 bp, Homo sapiens
  misc_feature: 734 for SV(C|O) and mtDNA
cggcaagtactattgacccagcgatgggggcttcgacatgggctttagggagtcataagtggagtccgtaaagaggtatctttactataaaagctattgtgtaagctagtcatattaagt

SEQ ID NO: 71146 - DNA, 120 bp, Homo sapiens
  misc_feature: 734 for SV(C|O) and mtDNA
ccccaattaggagggcactggcccccaacaggcatcaccccgctaaatcccctagaagtcccactcctaaacacatccgtattactcgcatcaggagtatcaatcacctgagctcaccat

SEQ ID NO: 71147 - DNA, 120 bp, Homo sapiens
  misc_feature: 734 for SV(C|O) and mtDNA
accgtatggcccaccataattacccccatactccttacactattcctcatcacccaactaaaaatattaaacacaaactaccacctacctccctcaccaaagcccataaaaataaaaaat

SEQ ID NO: 71148 - DNA, 120 bp, Homo sapiens
  misc_feature: 734 for SV(C|O) and mtDNA
attctatttccccctctattgatccccacctccaaatatctcatcaacaaccgactaatcaccacccaacaatgactaatcaaactaacctcaaaacaaatgataaccatacacaacact

SEQ ID NO: 71149 - DNA, 120 bp, Homo sapiens
  misc_feature: 734 for SV(C|O) and mtDNA
attaggagggcactggcccccaacaggcatcaccccgctaaatcccctagaagtcccactcctaaacacatccgtattactcgcatcaggagtatcaatcacctgagctcaccatagtct

SEQ ID NO: 71150 - DNA, 120 bp, Homo sapiens
  misc_feature: 734 for SV(C|O) and mtDNA
agcattattcgttacatggtccatcatagaattctcactgtgatatataaactcagacccaaacattaatcagttcttcaaatatctactcatcttcctaattaccatactaatcttagt

SEQ ID NO: 71151 - DNA, 120 bp, Homo sapiens
  misc_feature: 733 for SV(C|O) and mtDNA
cccaccctaccacacattcgaagaacccgtatacataaaatctagacaaaaaaggaaggaatcgaaccccccaaagctggtttcaagccaaccccatggcctccatgactttttcaaaaa

SEQ ID NO: 71152 - DNA, 120 bp, Homo sapiens
  misc_feature: 733 for SV(C|O) and mtDNA
ttaccctagggataacagcgcaatcctattctagagtccatatcaacaatagggtttacgacctcgatgttggatcaggacatcccgatggtgcagccgctattaaaggttcgtttgttc

SEQ ID NO: 71153 - DNA, 120 bp, Homo sapiens
  misc_feature: 733 for SV(C|O) and mtDNA
ccaagcataatacagcaaggactaacccctataccttctgcataatgaattaactagaaataactttgcaaggagagccaaagctaagacccccgaaaccagacgagctacctaagaaca

SEQ ID NO: 71154 - DNA, 120 bp, Homo sapiens
  misc_feature: 733 for SV(C|O) and mtDNA
tgtcgtgcaggtagaggcttactagaagtgtgaaaacgtaggcttggattaaggcgacagcgatttctaggatagtcagtagaattagaattgtgaagatgataagtgtagagggaaggt

SEQ ID NO: 71155 - DNA, 120 bp, Homo sapiens
  misc_feature: 733 for SV(C|O) and mtDNA
ctgtaatattgaacgtaggtgcgataaataataggatgaggcaggaatcaaagacagatactgcgacatagggtgctccggctccagcgtctcgcaatgctatcgcgtgcacacccccca

SEQ ID NO: 71156 - DNA, 120 bp, Homo sapiens
  misc_feature: 733 for SV(C|O) and mtDNA
aggggcctacaacgttggggcctttgcgtagttgtatatagcctagaatttttcgttcggtaagcattaggaatgccattgcgattagaatgggtacaatgaggagtaggaggttggcca

SEQ ID NO: 71157 - DNA, 120 bp, Homo sapiens
  misc_feature: 733 for SV(C|O) and mtDNA
tggaccatgtaacgaataatgctacagggatgaatattatggagaagtagtctagtttgaagcttagggagagctgggttgtttgggttgtggctcagtgtcagttcgagataataactt

SEQ ID NO: 71158 - DNA, 120 bp, Homo sapiens
  misc_feature: 733 for SV(C|O) and mtDNA
tcctgcgaagaaaaaaacttctgaggtaataaataggattatcccgtatcgaaggcctttttggacaggtggtgtgtggtggccttggtatgtgctttctcgtgttacatcgcgccatca

SEQ ID NO: 71159 - DNA, 120 bp, Homo sapiens
  misc_feature: 733 for SV(C|O) and mtDNA
gatagagtaaataataggagcttaaacccccttatttctaggactatgagaatcgaacccatccctgagaatccaaaattctccgtgccacctatcacaccccatcctaaagtaaggtca

SEQ ID NO: 71160 - DNA, 120 bp, Homo sapiens; identical to SEQ ID NO: 53259
  misc_feature: 733 for SV(C|O) and mtDNA

SEQ ID NO: 71161 - DNA, 120 bp, Homo sapiens; identical to SEQ ID NO: 54003
  misc_feature: 733 for SV(C|O) and mtDNA

SEQ ID NO: 71162 - DNA, 120 bp, Homo sapiens
  misc_feature: 733 for SV(C|O) and mtDNA
cccccaacaggcatcaccccgctaaatcccctagaagtcccactcctaaacacatccgtattactcgcatcaggagtatcaatcacctgagctcaccatagtctaatagaaaacaaccga

SEQ ID NO: 71163 - DNA, 120 bp, Homo sapiens
  misc_feature: 733 for SV(C|O) and mtDNA
actcaccctagcattacttatatgatatgtctccatacccattacaatctccagcattccccctcaaacctaagaaatatgtctgataaaagagttactttgatagagtaaataatagga

SEQ ID NO: 71164 - DNA, 120 bp, Homo sapiens
  misc_feature: 733 for SV(C|O) and mtDNA
ggggcaggcctcctagggagaggagggtggatggaattaagggtgttagtcatgttagcttgtttcaggtgcgagatagtagtagggtcgtggtgctggagtttaagttgagtagtagga

SEQ ID NO: 71165 - DNA, 120 bp, Homo sapiens
  misc_feature: 733 for SV(C|O) and mtDNA
agacatacagaaatagtcaaaccacgtctacaaaatgccagtatcaggcggcggcttcgaagccaaagtgatgtttggatgtaaagtgaaatattagttggcggatgaagcagatagtga

SEQ ID NO: 71166 - DNA, 120 bp, Homo sapiens
  misc_feature: 733 for SV(C|O) and mtDNA
accactcaccctagcattacttatatgatatgtctccatacccattacaatctccagcattccccctcaaacctaagaaatatgtctgataaaagagttactttgatagagtaaataata

SEQ ID NO: 71167 - DNA, 120 bp, Homo sapiens
  misc_feature: 733 for SV(C|O) and mtDNA
atgagagtagctataatgaacagtgatagtattattccttctaggcatagtagggaggatatgaggtgtgagcggtatactagtattcctagaagtgagatggtaaatgctagtataata

SEQ ID NO: 71168 - DNA, 120 bp, Homo sapiens
  misc_feature: 733 for SV(C|O) and mtDNA
aaaataaaccctcgttccacagaagctgccatcaagtatttcctcacgcaagcaaccgcatccataatccttctaatagctatcctcttcaacaatatactctccggacaatgaaccata

SEQ ID NO: 71169 - DNA, 120 bp, Homo sapiens; identical to SEQ ID NO: 53396
  misc_feature: 733 for SV(C|O) and mtDNA

SEQ ID NO: 71170 - DNA, 120 bp, Homo sapiens; identical to SEQ ID NO: 55672
  misc_feature: 733 for SV(C|O) and mtDNA

SEQ ID NO: 71171 - DNA, 120 bp, Homo sapiens
  misc_feature: 733 for SV(C|O) and mtDNA
gtccaaagaggaacagctctttggacactaggaaaaaaccttgtagagagagtaaaaaatttaacacccatagtaggcctaaaagcagccaccaattaagaaagcgttcaagctcaacac

SEQ ID NO: 71172 - DNA, 120 bp, Homo sapiens
  misc_feature: 733 for SV(C|O) and mtDNA
gtaactactactaatcaacgcccataatcatacaaagcccccgcaccaataggatcctcccgaatcaaccctgacccctctccttcataaattattcagcttcctacactattaaagttt

SEQ ID NO: 71173 - DNA, 120 bp, Homo sapiens
  misc_feature: 733 for SV(C|O) and mtDNA
ggtttgttggtatcctagtgggtgaggggtggctttggagttgcagttgatgtgtgatagttgagggttgattgctgtacttgcttgtaagcatggggagggggttttgatgtggattgg

SEQ ID NO: 71174 - DNA, 120 bp, Homo sapiens
  misc_feature: 733 for SV(C|O) and mtDNA
cctctattgatccccacctccaaatatctcatcaacaaccgactaatcaccacccaacaatgactaatcaaactaacctcaaaacaaatgataaccatacacaacactaaaggacgaacc

SEQ ID NO: 71175 - DNA, 120 bp, Homo sapiens
  misc_feature: 733 for SV(C|O) and mtDNA
atactagcatttaccatctcacttctaggaatactagtataccgctcacacctcatatcctccctactatgcctagaaggaataatactatcactgttcattatagctactctcataacc

SEQ ID NO: 71176 - DNA, 120 bp, Homo sapiens
  misc_feature: 733 for SV(C|O) and mtDNA
cgttaacttccaattaactagttttgacaacattcaaaaaagagtaataaacttcgccttaattttaataatcaacaccctcctagccttactactaataattattacattttgactacc

SEQ ID NO: 71177 - DNA, 120 bp, Homo sapiens; identical to SEQ ID NO: 53020
  misc_feature: 733 for SV(C|O) and mtDNA

SEQ ID NO: 71178 - DNA, 120 bp, Homo sapiens; identical to SEQ ID NO: 56767
  misc_feature: 733 for SV(C|O) and mtDNA

SEQ ID NO: 71179 - DNA, 120 bp, Homo sapiens; identical to SEQ ID NO: 54740
  misc_feature: 733 for SV(C|O) and mtDNA

SEQ ID NO: 71180 - DNA, 120 bp, Homo sapiens; identical to SEQ ID NO: 56384
  misc_feature: 733 for SV(C|O) and mtDNA

SEQ ID NO: 71181 - DNA, 120 bp, Homo sapiens
  misc_feature: 733 for SV(C|O) and mtDNA
acagtgagaattctatgatggaccatgtaacgaataatgctacagggatgaatattatggagaagtagtctagtttgaagcttagggagagctgggttgtttgggttgtggctcagtgtc

SEQ ID NO: 71182 - DNA, 120 bp, Homo sapiens
  misc_feature: 733 for SV(C|O) and mtDNA
gaatcttagctttgggtgctaatggtggagttaaagactttttctctgatttgtccttggaaaaaggttttcatctccggtttacaagactggtgtattagtttatactacaaggacagg

SEQ ID NO: 71183 - DNA, 120 bp, Homo sapiens
  misc_feature: 733 for SV(C|O) and mtDNA
caagcataatacagcaaggactaacccctataccttctgcataatgaattaactagaaataactttgcaaggagagccaaagctaagacccccgaaaccagacgagctacctaagaacag

SEQ ID NO: 71184 - DNA, 120 bp, Homo sapiens
  misc_feature: 733 for SV(C|O) and mtDNA
cgtaaggggtggatttttctatgtagccgttgagttgtggtagtcaaaatgtaataattattagtagtaaggctaggagggtgttgattattaaaattaaggcgaagtttattactcttt

SEQ ID NO: 71185 - DNA, 120 bp, Homo sapiens; identical to SEQ ID NO: 56207
  misc_feature: 733 for SV(C|O) and mtDNA

SEQ ID NO: 71186 - DNA, 120 bp, Homo sapiens; identical to SEQ ID NO: 60610
  misc_feature: 733 for SV(C|O) and mtDNA

SEQ ID NO: 71187 - DNA, 120 bp, Homo sapiens
  misc_feature: 733 for SV(C|O) and mtDNA
ataggaagtatgtgcctgcgttcaggcgttctggctggttgcctcatcgggtgatgatagccaaggtggggataagtgtggtttcgaagaagatataaaatatgattagttctgtggctg

SEQ ID NO: 71188 - DNA, 120 bp, Homo sapiens
  misc_feature: 733 for SV(C|O) and mtDNA
atgccccccaccctaccacacattcgaagaacccgtatacataaaatctagacaaaaaaggaaggaatcgaaccccccaaagctggtttcaagccaaccccatggcctccatgacttttt

SEQ ID NO: 71189 - DNA, 120 bp, Homo sapiens; identical to SEQ ID NO: 55335
  misc_feature: 733 for SV(C|O) and mtDNA

SEQ ID NO: 71190 - DNA, 120 bp, Homo sapiens
  misc_feature: 733 for SV(C|O) and mtDNA
agctgaataatttatgaaggagaggggtcagggttgattcgggaggatcctattggtgcgggggctttgtatgattatgggcgttgattagtagtagttactggttgaacattgtttgtt

SEQ ID NO: 71191 - DNA, 120 bp, Homo sapiens; identical to SEQ ID NO: 57531
  misc_feature: 733 for SV(C|O) and mtDNA

SEQ ID NO: 71192 - DNA, 120 bp, Homo sapiens
  misc_feature: 733 for SV(C|O) and mtDNA
acttctaggaatactagtataccgctcacacctcatatcctccctactatgcctagaaggaataatactatcactgttcattatagctactctcataaccctcaacacccactccctctt

SEQ ID NO: 71193 - DNA, 120 bp, Homo sapiens; identical to SEQ ID NO: 53739
  misc_feature: 732 for SV(C|O) and mtDNA

SEQ ID NO: 71194 - DNA, 120 bp, Homo sapiens
  misc_feature: 732 for SV(C|O) and mtDNA
ctccctaaagcccatgtcgaagcccccatcgctgggtcaatagtacttgccgcagtactcttaaaactaggcggctatggtataatacgcctcacactcattctcaaccccctgacaaaa

SEQ ID NO: 71195 - DNA, 120 bp, Homo sapiens
  misc_feature: 732 for SV(C|O) and mtDNA
tttcttctaagccttctcctatttatgggggtttagtattgattgttagcggtgtggtcgggtgtgttattattctgaattttgggggaggttatatgggtttaatagtttttttaattt

SEQ ID NO: 71196 - DNA, 120 bp, Homo sapiens
  misc_feature: 732 for SV(C|O) and mtDNA
gactccctaaagcccatgtcgaagcccccatcgctgggtcaatagtacttgccgcagtactcttaaaactaggcggctatggtataatacgcctcacactcattctcaaccccctgacaa

SEQ ID NO: 71197 - DNA, 120 bp, Homo sapiens
  misc_feature: 732 for SV(C|O) and mtDNA
ttggatatactacagcgatggctattgaggagtatcctgaggcatgggggtcaggggttgaggtcttggtgagtgttttagtggggttagcgatggaggtaggattggtgctgtgggtga

SEQ ID NO: 71198 - DNA, 120 bp, Homo sapiens; identical to SEQ ID NO: 54249
  misc_feature: 732 for SV(C|O) and mtDNA

SEQ ID NO: 71199 - DNA, 120 bp, Homo sapiens
  misc_feature: 732 for SV(C|O) and mtDNA
aataataggagcttaaacccccttatttctaggactatgagaatcgaacccatccctgagaatccaaaattctccgtgccacctatcacaccccatcctaaagtaaggtcagctaaataa

SEQ ID NO: 71200 - DNA, 120 bp, Homo sapiens
  misc_feature: 732 for SV(C|O) and mtDNA
aaataaaccctcgttccacagaagctgccatcaagtatttcctcacgcaagcaaccgcatccataatccttctaatagctatcctcttcaacaatatactctccggacaatgaaccataa

SEQ ID NO: 71201 - DNA, 120 bp, Homo sapiens; identical to SEQ ID NO: 60255
  misc_feature: 732 for SV(C|O) and mtDNA

SEQ ID NO: 71202 - DNA, 120 bp, Homo sapiens
  misc_feature: 732 for SV(C|O) and mtDNA
ttagtataaaaggggagataggtaggagtagcgtggtaagggcgatgagtgtggggaggaatggggtgggttttgtatgttcaaactgtcattttatttttacgttgttagatatgggga

SEQ ID NO: 71203 - DNA, 120 bp, Homo sapiens; identical to SEQ ID NO: 52729
  misc_feature: 732 for SV(C|O) and mtDNA

SEQ ID NO: 71204 - DNA, 120 bp, Homo sapiens
  misc_feature: 732 for SV(C|O) and mtDNA
aaataggttgttgttgatttggttaaaaaatagtagagggatgatgctaataattaggctgtgggtggttgtgttgattcaaattatgtgttttttggaaagtcatgtcagtggtagtaa

SEQ ID NO: 71205 - DNA, 120 bp, Homo sapiens; identical to SEQ ID NO: 51946
  misc_feature: 732 for SV(C|O) and mtDNA

SEQ ID NO: 71206 - DNA, 120 bp, Homo sapiens
  misc_feature: 732 for SV(C|O) and mtDNA
ctaaacctactccaatgctaaaactaatcgtcccaacaattatattactaccactgacatgactttccaaaaaacacataatttgaatcaacacaaccacccacagcctaattattagca

SEQ ID NO: 71207 - DNA, 120 bp, Homo sapiens
  misc_feature: 732 for SV(C|O) and mtDNA
attctatgatggaccatgtaacgaataatgctacagggatgaatattatggagaagtagtctagtttgaagcttagggagagctgggttgtttgggttgtggctcagtgtcagttcgaga

SEQ ID NO: 71208 - DNA, 120 bp, Homo sapiens
  misc_feature: 732 for SV(C|O) and mtDNA
ctattgatccccacctccaaatatctcatcaacaaccgactaatcaccacccaacaatgactaatcaaactaacctcaaaacaaatgataaccatacacaacactaaaggacgaacctga

SEQ ID NO: 71209 - DNA, 120 bp, Homo sapiens
  misc_feature: 732 for SV(C|O) and mtDNA
tagtgtaggaagctgaataatttatgaaggagaggggtcagggttgattcgggaggatcctattggtgcgggggctttgtatgattatgggcgttgattagtagtagttactggttgaac

SEQ ID NO: 71210 - DNA, 120 bp, Homo sapiens
  misc_feature: 732 for SV(C|O) and mtDNA
cgcccactaagccaatcactttattgactcctagccgcagacctcctcattctaacctgaatcggaggacaaccagtaagctacccttttaccatcattggacaagtagcatccgtacta

SEQ ID NO: 71211 - DNA, 120 bp, Homo sapiens
  misc_feature: 732 for SV(C|O) and mtDNA
taataggatgaggcaggaatcaaagacagatactgcgacatagggtgctccggctccagcgtctcgcaatgctatcgcgtgcacaccccccagacgaaaataccaaatgcatggagagct

SEQ ID NO: 71212 - DNA, 120 bp, Homo sapiens
  misc_feature: 732 for SV(C|O) and mtDNA
gaaggcctttttggacaggtggtgtgtggtggccttggtatgtgctttctcgtgttacatcgcgccatcattggtatatggttagtgtgttggttagtaggcctagtatgaggagcgtta

SEQ ID NO: 71213 - DNA, 120 bp, Homo sapiens
  misc_feature: 732 for SV(C|O) and mtDNA
cattcgaagaacccgtatacataaaatctagacaaaaaaggaaggaatcgaaccccccaaagctggtttcaagccaaccccatggcctccatgactttttcaaaaaggtattagaaaaac

SEQ ID NO: 71214 - DNA, 120 bp, Homo sapiens
  misc_feature: 732 for SV(C|O) and mtDNA
gtgagaattctatgatggaccatgtaacgaataatgctacagggatgaatattatggagaagtagtctagtttgaagcttagggagagctgggttgtttgggttgtggctcagtgtcagt

SEQ ID NO: 71215 - DNA, 120 bp, Homo sapiens
  misc_feature: 732 for SV(C|O) and mtDNA
aactactactaatcaacgcccataatcatacaaagcccccgcaccaataggatcctcccgaatcaaccctgacccctctccttcataaattattcagcttcctacactattaaagtttac

SEQ ID NO: 71216 - DNA, 120 bp, Homo sapiens
  misc_feature: 732 for SV(C|O) and mtDNA
agttgtaaaaaactccagctgacacaaaatagactacgaaagtggctttaacatatctgaacacacaatagctaagacccaaactgggattagataccccactatgcttagccctaaacc

SEQ ID NO: 71217 - DNA, 120 bp, Homo sapiens
  misc_feature: 732 for SV(C|O) and mtDNA
atgtaaaatccattgtcgcatccacctttattatcagtctcttccccacaacaatattcatgtgcctagaccaagaagttattatctcgaactgacactgagccacaacccaaacaaccc

SEQ ID NO: 71218 - DNA, 120 bp, Homo sapiens
  misc_feature: 732 for SV(C|O) and mtDNA
ggctttgaaggctcttggtctgtatttaacctaaatttctataagattattagtataaaaggggagataggtaggagtagcgtggtaagggcgatgagtgtggggaggaatggggtgggt

SEQ ID NO: 71219 - DNA, 120 bp, Homo sapiens; identical to SEQ ID NO: 53288
  misc_feature: 732 for SV(C|O) and mtDNA

SEQ ID NO: 71220 - DNA, 120 bp, Homo sapiens
  misc_feature: 732 for SV(C|O) and mtDNA
ataataggatgaggcaggaatcaaagacagatactgcgacatagggtgctccggctccagcgtctcgcaatgctatcgcgtgcacaccccccagacgaaaataccaaatgcatggagagc

SEQ ID NO: 71221 - DNA, 120 bp, Homo sapiens; identical to SEQ ID NO: 59240
  misc_feature: 732 for SV(C|O) and mtDNA

SEQ ID NO: 71222 - DNA, 120 bp, Homo sapiens
  misc_feature: 732 for SV(C|O) and mtDNA
cgacctccccaccccatccaacatctccgcatgatgaaacttcggctcactccttggcgcctgcctgatcctccaaatcaccacaggactattcctagccatgcactactcaccagacgc

SEQ ID NO: 71223 - DNA, 120 bp, Homo sapiens; identical to SEQ ID NO: 54071
  misc_feature: 732 for SV(C|O) and mtDNA

SEQ ID NO: 71224 - DNA, 120 bp, Homo sapiens; identical to SEQ ID NO: 53528
  misc_feature: 732 for SV(C|O) and mtDNA

SEQ ID NO: 71225 - DNA, 120 bp, Homo sapiens
  misc_feature: 732 for SV(C|O) and mtDNA
gagagtagctataatgaacagtgatagtattattccttctaggcatagtagggaggatatgaggtgtgagcggtatactagtattcctagaagtgagatggtaaatgctagtataatatt

SEQ ID NO: 71226 - DNA, 120 bp, Homo sapiens; identical to SEQ ID NO: 52281
  misc_feature: 732 for SV(C|O) and mtDNA

SEQ ID NO: 71227 - DNA, 120 bp, Homo sapiens; identical to SEQ ID NO: 52245
  misc_feature: 732 for SV(C|O) and mtDNA

SEQ ID NO: 71228 - DNA, 120 bp, Homo sapiens
  misc_feature: 732 for SV(C|O) and mtDNA
ctctattgatccccacctccaaatatctcatcaacaaccgactaatcaccacccaacaatgactaatcaaactaacctcaaaacaaatgataaccatacacaacactaaaggacgaacct

SEQ ID NO: 71229 - DNA, 120 bp, Homo sapiens
  misc_feature: 732 for SV(C|O) and mtDNA
cccgtatcgaaggcctttttggacaggtggtgtgtggtggccttggtatgtgctttctcgtgttacatcgcgccatcattggtatatggttagtgtgttggttagtaggcctagtatgag

SEQ ID NO: 71230 - DNA, 120 bp, Homo sapiens
  misc_feature: 732 for SV(C|O) and mtDNA
cgtatcatcaactgatgagcaagaaggatataattcctacgccctctcagccgatgaacagttggaataggttgttagcggtaactaagattagtatggtaattaggaagatgagtagat

SEQ ID NO: 71231 - DNA, 120 bp, Homo sapiens
  misc_feature: 732 for SV(C|O) and mtDNA
catcactagacatcgtactacacgacacgtactacgttgtagctcacttccactatgtcctatcaataggagctgtatttgccatcataggaggcttcattcactgatttcccctattct

SEQ ID NO: 71232 - DNA, 120 bp, Homo sapiens
  misc_feature: 732 for SV(C|O) and mtDNA
cacactactccccatatctaacaacgtaaaaataaaatgacagtttgaacatacaaaacccaccccattcctccccacactcatcgcccttaccacgctactcctacctatctccccttt

SEQ ID NO: 71233 - DNA, 120 bp, Homo sapiens; identical to SEQ ID NO: 60931
  misc_feature: 732 for SV(C|O) and mtDNA

SEQ ID NO: 71234 - DNA, 120 bp, Homo sapiens
  misc_feature: 732 for SV(C|O) and mtDNA
actagggtgtagaataggaagtatgtgcctgcgttcaggcgttctggctggttgcctcatcgggtgatgatagccaaggtggggataagtgtggtttcgaagaagatataaaatatgatt

SEQ ID NO: 71235 - DNA, 120 bp, Homo sapiens
  misc_feature: 731 for SV(C|O) and mtDNA
taccgtatggcccaccataattacccccatactccttacactattcctcatcacccaactaaaaatattaaacacaaactaccacctacctccctcaccaaagcccataaaaataaaaaa

SEQ ID NO: 71236 - DNA, 120 bp, Homo sapiens; identical to SEQ ID NO: 58043
  misc_feature: 731 for SV(C|O) and mtDNA

SEQ ID NO: 71237 - DNA, 120 bp, Homo sapiens
  misc_feature: 731 for SV(C|O) and mtDNA
tactcggattctaccctaccatcacacaccgcacaatcccctatctaggccttcttacgagccaaaacctgcccctactcctcctagacctaacctgactagaaaagctattacctaaaa

SEQ ID NO: 71238 - DNA, 120 bp, Homo sapiens
  misc_feature: 731 for SV(C|O) and mtDNA
accccactaaaacactcaccaagacctcaacccctgacccccatgcctcaggatactcctcaatagccatcgctgtagtatatccaaagacaaccatcattccccctaaataaattaaaa

SEQ ID NO: 71239 - DNA, 120 bp, Homo sapiens
  misc_feature: 731 for SV(C|O) and mtDNA
cccaacaggcatcaccccgctaaatcccctagaagtcccactcctaaacacatccgtattactcgcatcaggagtatcaatcacctgagctcaccatagtctaatagaaaacaaccgaaa

SEQ ID NO: 71240 - DNA, 120 bp, Homo sapiens
  misc_feature: 731 for SV(C|O) and mtDNA
ttctagatcaaataataagaaggtaatagctactaagaagaattttatggagaaagggacgcgggcgggggatatagggtcgaagccgcactcgtaaggggtggatttttctatgtagcc

SEQ ID NO: 71241 - DNA, 120 bp, Homo sapiens
  misc_feature: 731 for SV(C|O) and mtDNA
aaataaattaaaaaaactattaaacccatataacctcccccaaaattcagaataataacacacccgaccacaccgctaacaatcaatactaaacccccataaataggagaaggcttagaa

SEQ ID NO: 71242 - DNA, 120 bp, Homo sapiens
  misc_feature: 731 for SV(C|O) and mtDNA
ttatatatcacagtgagaattctatgatggaccatgtaacgaataatgctacagggatgaatattatggagaagtagtctagtttgaagcttagggagagctgggttgtttgggttgtgg

SEQ ID NO: 71243 - DNA, 120 bp, Homo sapiens
  misc_feature: 731 for SV(C|O) and mtDNA
tctctaacagcagtaatattaataattttcatgatttgagaagccttcgcttcgaagcgaaaagtcctaatagtagaagaaccctccataaacctggagtgactatatggatgcccccca

SEQ ID NO: 71244 - DNA, 120 bp, Homo sapiens
  misc_feature: 731 for SV(C|O) and mtDNA
tgaggggtggctttggagttgcagttgatgtgtgatagttgagggttgattgctgtacttgcttgtaagcatggggagggggttttgatgtggattgggtttttatgtactacaggtggt

SEQ ID NO: 71245 - DNA, 120 bp, Homo sapiens
  misc_feature: 731 for SV(C|O) and mtDNA
tctctacaaggttttttcctagtgtccaaagagctgttcctctttggactaacagttaaatttacaaggggatttagagggttctgtgggcaaatttaaagttgaactaagattctatct

SEQ ID NO: 71246 - DNA, 120 bp, Homo sapiens
  misc_feature: 731 for SV(C|O) and mtDNA
gctggttgcctcatcgggtgatgatagccaaggtggggataagtgtggtttcgaagaagatataaaatatgattagttctgtggctgtgaatgttataattaaggagatttgtagggaga

SEQ ID NO: 71247 - DNA, 120 bp, Homo sapiens
  misc_feature: 731 for SV(C|O) and mtDNA
tccctaaagcccatgtcgaagcccccatcgctgggtcaatagtacttgccgcagtactcttaaaactaggcggctatggtataatacgcctcacactcattctcaaccccctgacaaaac

SEQ ID NO: 71248 - DNA, 120 bp, Homo sapiens; identical to SEQ ID NO: 54088
  misc_feature: 731 for SV(C|O) and mtDNA

SEQ ID NO: 71249 - DNA, 120 bp, Homo sapiens
  misc_feature: 731 for SV(C|O) and mtDNA
tatactagcatttaccatctcacttctaggaatactagtataccgctcacacctcatatcctccctactatgcctagaaggaataatactatcactgttcattatagctactctcataac

SEQ ID NO: 71250 - DNA, 120 bp, Homo sapiens; identical to SEQ ID NO: 53727
  misc_feature: 731 for SV(C|O) and mtDNA

SEQ ID NO: 71251 - DNA, 120 bp, Homo sapiens
  misc_feature: 731 for SV(C|O) and mtDNA
taggaagctgaataatttatgaaggagaggggtcagggttgattcgggaggatcctattggtgcgggggctttgtatgattatgggcgttgattagtagtagttactggttgaacattgt

SEQ ID NO: 71252 - DNA, 120 bp, Homo sapiens
  misc_feature: 731 for SV(C|O) and mtDNA
gcataatacagcaaggactaacccctataccttctgcataatgaattaactagaaataactttgcaaggagagccaaagctaagacccccgaaaccagacgagctacctaagaacagcta

SEQ ID NO: 71253 - DNA, 120 bp, Homo sapiens; identical to SEQ ID NO: 52131
  misc_feature: 731 for SV(C|O) and mtDNA

SEQ ID NO: 71254 - DNA, 120 bp, Homo sapiens
  misc_feature: 731 for SV(C|O) and mtDNA
agggctaggatgatgattaataagagggatgacataactattagtggtaggttagttgtttgtagggctcatggtaggggtaaaaggagggcaatttctagatcaaataataagaaggta

SEQ ID NO: 71255 - DNA, 120 bp, Homo sapiens
  misc_feature: 731 for SV(C|O) and mtDNA
ctagggtgtagaataggaagtatgtgcctgcgttcaggcgttctggctggttgcctcatcgggtgatgatagccaaggtggggataagtgtggtttcgaagaagatataaaatatgatta

SEQ ID NO: 71256 - DNA, 120 bp, Homo sapiens
  misc_feature: 731 for SV(C|O) and mtDNA
atgctaataattaggctgtgggtggttgtgttgattcaaattatgtgttttttggaaagtcatgtcagtggtagtaatataattgttgggacgattagttttagcattggagtaggttta

SEQ ID NO: 71257 - DNA, 120 bp, Homo sapiens
  misc_feature: 731 for SV(C|O) and mtDNA
ccaacaggcatcaccccgctaaatcccctagaagtcccactcctaaacacatccgtattactcgcatcaggagtatcaatcacctgagctcaccatagtctaatagaaaacaaccgaaac

SEQ ID NO: 71258 - DNA, 120 bp, Homo sapiens
  misc_feature: 731 for SV(C|O) and mtDNA
gagttgtaaaaaactccagctgacacaaaatagactacgaaagtggctttaacatatctgaacacacaatagctaagacccaaactgggattagataccccactatgcttagccctaaac

SEQ ID NO: 71259 - DNA, 120 bp, Homo sapiens; identical to SEQ ID NO: 55778
  misc_feature: 731 for SV(C|O) and mtDNA

SEQ ID NO: 71260 - DNA, 120 bp, Homo sapiens
  misc_feature: 731 for SV(C|O) and mtDNA
catcgtactacacgacacgtactacgttgtagctcacttccactatgtcctatcaataggagctgtatttgccatcataggaggcttcattcactgatttcccctattctcaggctacac

SEQ ID NO: 71261 - DNA, 120 bp, Homo sapiens
  misc_feature: 731 for SV(C|O) and mtDNA
gtcgtgcaggtagaggcttactagaagtgtgaaaacgtaggcttggattaaggcgacagcgatttctaggatagtcagtagaattagaattgtgaagatgataagtgtagagggaaggtt

SEQ ID NO: 71262 - DNA, 120 bp, Homo sapiens
  misc_feature: 731 for SV(C|O) and mtDNA
attattcgttacatggtccatcatagaattctcactgtgatatataaactcagacccaaacattaatcagttcttcaaatatctactcatcttcctaattaccatactaatcttagttac

SEQ ID NO: 71263 - DNA, 120 bp, Homo sapiens; identical to SEQ ID NO: 60947
  misc_feature: 731 for SV(C|O) and mtDNA

SEQ ID NO: 71264 - DNA, 120 bp, Homo sapiens
  misc_feature: 731 for SV(C|O) and mtDNA
gtaaaaaatttaacacccatagtaggcctaaaagcagccaccaattaagaaagcgttcaagctcaacacccactacctaaaaaatcccaaacatataactgaactcctcacacccaattg

SEQ ID NO: 71265 - DNA, 120 bp, Homo sapiens
  misc_feature: 731 for SV(C|O) and mtDNA
gacggcatctacggctcaacattttttgtagccacaggcttccacggacttcacgtcattattggctcaactttcctcactatctgcttcatccgccaactaatatttcactttacatcc

SEQ ID NO: 71266 - DNA, 120 bp, Homo sapiens
  misc_feature: 731 for SV(C|O) and mtDNA
gatttctaggatagtcagtagaattagaattgtgaagatgataagtgtagagggaaggttaatggttgatattgctagggtggcgcttccaattaggtgcatgagtaggtggcctgcagt

SEQ ID NO: 71267 - DNA, 120 bp, Homo sapiens; identical to SEQ ID NO: 57731
  misc_feature: 731 for SV(C|O) and mtDNA

SEQ ID NO: 71268 - DNA, 120 bp, Homo sapiens
  misc_feature: 731 for SV(C|O) and mtDNA
ccaccctaccacacattcgaagaacccgtatacataaaatctagacaaaaaaggaaggaatcgaaccccccaaagctggtttcaagccaaccccatggcctccatgactttttcaaaaag

SEQ ID NO: 71269 - DNA, 120 bp, Homo sapiens; identical to SEQ ID NO: 59295
  misc_feature: 731 for SV(C|O) and mtDNA

SEQ ID NO: 71270 - DNA, 120 bp, Homo sapiens
  misc_feature: 731 for SV(C|O) and mtDNA
aataaattaaaaaaactattaaacccatataacctcccccaaaattcagaataataacacacccgaccacaccgctaacaatcaatactaaacccccataaataggagaaggcttagaag

SEQ ID NO: 71271 - DNA, 120 bp, Homo sapiens
  misc_feature: 731 for SV(C|O) and mtDNA
ctcacgcaagcaaccgcatccataatccttctaatagctatcctcttcaacaatatactctccggacaatgaaccataaccaatactaccaatcaatactcatcattaataatcataatg

SEQ ID NO: 71272 - DNA, 120 bp, Homo sapiens; identical to SEQ ID NO: 56264
  misc_feature: 731 for SV(C|O) and mtDNA

SEQ ID NO: 71273 - DNA, 120 bp, Homo sapiens; identical to SEQ ID NO: 52144
  misc_feature: 731 for SV(C|O) and mtDNA

SEQ ID NO: 71274 - DNA, 120 bp, Homo sapiens
  misc_feature: 731 for SV(C|O) and mtDNA
atgcacattttatttctccaacatactcggattctaccctaccatcacacaccgcacaatcccctatctaggccttcttacgagccaaaacctgcccctactcctcctagacctaacctg

SEQ ID NO: 71275 - DNA, 120 bp, Homo sapiens; identical to SEQ ID NO: 60310
  misc_feature: 731 for SV(C|O) and mtDNA

SEQ ID NO: 71276 - DNA, 120 bp, Homo sapiens
  misc_feature: 730 for SV(C|O) and mtDNA
taatacagcaaggactaacccctataccttctgcataatgaattaactagaaataactttgcaaggagagccaaagctaagacccccgaaaccagacgagctacctaagaacagctaaaa

SEQ ID NO: 71277 - DNA, 120 bp, Homo sapiens
  misc_feature: 730 for SV(C|O) and mtDNA
actccctaaagcccatgtcgaagcccccatcgctgggtcaatagtacttgccgcagtactcttaaaactaggcggctatggtataatacgcctcacactcattctcaaccccctgacaaa

SEQ ID NO: 71278 - DNA, 120 bp, Homo sapiens
  misc_feature: 730 for SV(C|O) and mtDNA
aaaggcataattaaactttacttcctctctttcttcttcccactcatcctaaccctactcctaatcacataacctattcccccgagcaatctcaattacaatatatacaccaacaaacaa

SEQ ID NO: 71279 - DNA, 120 bp, Homo sapiens
  misc_feature: 730 for SV(C|O) and mtDNA
ttgatagagtaaataataggagcttaaacccccttatttctaggactatgagaatcgaacccatccctgagaatccaaaattctccgtgccacctatcacaccccatcctaaagtaaggt

SEQ ID NO: 71280 - DNA, 120 bp, Homo sapiens
  misc_feature: 730 for SV(C|O) and mtDNA
tgtttaccaaaaacatcacctctagcatcaccagtattagaggcaccgcctgcccagtgacacatgtttaacggccgcggtaccctaaccgtgcaaaggtagcataatcacttgttcctt

SEQ ID NO: 71281 - DNA, 120 bp, Homo sapiens
  misc_feature: 730 for SV(C|O) and mtDNA
gagagtaaaaaatttaacacccatagtaggcctaaaagcagccaccaattaagaaagcgttcaagctcaacacccactacctaaaaaatcccaaacatataactgaactcctcacaccca

SEQ ID NO: 71282 - DNA, 120 bp, Homo sapiens
  misc_feature: 730 for SV(C|O) and mtDNA
cagcaaggactaacccctataccttctgcataatgaattaactagaaataactttgcaaggagagccaaagctaagacccccgaaaccagacgagctacctaagaacagctaaaagagca

SEQ ID NO: 71283 - DNA, 120 bp, Homo sapiens
  misc_feature: 730 for SV(C|O) and mtDNA
gctgccatcaagtatttcctcacgcaagcaaccgcatccataatccttctaatagctatcctcttcaacaatatactctccggacaatgaaccataaccaatactaccaatcaatactca

SEQ ID NO: 71284 - DNA, 120 bp, Homo sapiens
  misc_feature: 730 for SV(C|O) and mtDNA
tctgtaatattgaacgtaggtgcgataaataataggatgaggcaggaatcaaagacagatactgcgacatagggtgctccggctccagcgtctcgcaatgctatcgcgtgcacacccccc

SEQ ID NO: 71285 - DNA, 120 bp, Homo sapiens
  misc_feature: 730 for SV(C|O) and mtDNA
tctattgatccccacctccaaatatctcatcaacaaccgactaatcaccacccaacaatgactaatcaaactaacctcaaaacaaatgataaccatacacaacactaaaggacgaacctg

SEQ ID NO: 71286 - DNA, 120 bp, Homo sapiens; identical to SEQ ID NO: 58104
  misc_feature: 730 for SV(C|O) and mtDNA

SEQ ID NO: 71287 - DNA, 120 bp, Homo sapiens
  misc_feature: 730 for SV(C|O) and mtDNA
ataagcagtgcttgaattatttggtttcggttgttttctattagactatggtgagctcaggtgattgatactcctgatgcgagtaatacggatgtgtttaggagtgggacttctagggga

SEQ ID NO: 71288 - DNA, 120 bp, Homo sapiens
  misc_feature: 730 for SV(C|O) and mtDNA
tccccctctattgatccccacctccaaatatctcatcaacaaccgactaatcaccacccaacaatgactaatcaaactaacctcaaaacaaatgataaccatacacaacactaaaggacg

SEQ ID NO: 71289 - DNA, 120 bp, Homo sapiens; identical to SEQ ID NO: 56489
  misc_feature: 730 for SV(C|O) and mtDNA

SEQ ID NO: 71290 - DNA, 120 bp, Homo sapiens
  misc_feature: 730 for SV(C|O) and mtDNA
tcaaactagactacttctccataatattcatccctgtagcattattcgttacatggtccatcatagaattctcactgtgatatataaactcagacccaaacattaatcagttcttcaaat

SEQ ID NO: 71291 - DNA, 120 bp, Homo sapiens
  misc_feature: 730 for SV(C|O) and mtDNA
aaataataggagcttaaacccccttatttctaggactatgagaatcgaacccatccctgagaatccaaaattctccgtgccacctatcacaccccatcctaaagtaaggtcagctaaata

SEQ ID NO: 71292 - DNA, 120 bp, Homo sapiens
  misc_feature: 730 for SV(C|O) and mtDNA
ctaataaaattaattaaccactcattcatcgacctccccaccccatccaacatctccgcatgatgaaacttcggctcactccttggcgcctgcctgatcctccaaatcaccacaggacta

SEQ ID NO: 71293 - DNA, 120 bp, Homo sapiens
  misc_feature: 730 for SV(C|O) and mtDNA
ccttaattttaataatcaacaccctcctagccttactactaataattattacattttgactaccacaactcaacggctacatagaaaaatccaccccttacgagtgcggcttcgacccta

SEQ ID NO: 71294 - DNA, 120 bp, Homo sapiens
  misc_feature: 730 for SV(C|O) and mtDNA
tagcataatcacttgttccttaaatagggacctgtatgaatggctccacgagggttcagctgtctcttacttttaaccagtgaaattgacctgcccgtgaagaggcgggcatgacacagc

SEQ ID NO: 71295 - DNA, 120 bp, Homo sapiens
  misc_feature: 730 for SV(C|O) and mtDNA
gtataaaaggggagataggtaggagtagcgtggtaagggcgatgagtgtggggaggaatggggtgggttttgtatgttcaaactgtcattttatttttacgttgttagatatggggagta

SEQ ID NO: 71296 - DNA, 120 bp, Homo sapiens
  misc_feature: 730 for SV(C|O) and mtDNA
taaaaaatcccaaacatataactgaactcctcacacccaattggaccaatctatcaccctatagaagaactaatgttagtataagtaacatgaaaacattctcctccgcataagcctgcg

SEQ ID NO: 71297 - DNA, 120 bp, Homo sapiens
  misc_feature: 730 for SV(C|O) and mtDNA
gttcttcaaatatctactcatcttcctaattaccatactaatcttagttaccgctaacaacctattccaactgttcatcggctgagagggcgtaggaattatatccttcttgctcatcag

SEQ ID NO: 71298 - DNA, 120 bp, Homo sapiens
  misc_feature: 730 for SV(C|O) and mtDNA
aaatctccttaattataacattcacagccacagaactaatcatattttatatcttcttcgaaaccacacttatccccaccttggctatcatcacccgatgaggcaaccagccagaacgcc

SEQ ID NO: 71299 - DNA, 120 bp, Homo sapiens; identical to SEQ ID NO: 60222
  misc_feature: 730 for SV(C|O) and mtDNA

SEQ ID NO: 71300 - DNA, 120 bp, Homo sapiens
  misc_feature: 730 for SV(C|O) and mtDNA
ggaagcagatttgggtgccacccaagtattgactcacccatcaacaaccgctatgtaattcgtacattactgccagccaccatgaatattgtacggtaccataaatacttgaccacctgt

SEQ ID NO: 71301 - DNA, 120 bp, Homo sapiens
  misc_feature: 730 for SV(C|O) and mtDNA
cgtacattactgccagccaccatgaatattgtacggtaccataaatacttgaccacctgtagtacataaaaacccaatccacatcaaaaccccctccccatgcttacaagcaagtacagc

SEQ ID NO: 71302 - DNA, 120 bp, Homo sapiens
  misc_feature: 730 for SV(C|O) and mtDNA
gctgaataatttatgaaggagaggggtcagggttgattcgggaggatcctattggtgcgggggctttgtatgattatgggcgttgattagtagtagttactggttgaacattgtttgttg

SEQ ID NO: 71303 - DNA, 120 bp, Homo sapiens; identical to SEQ ID NO: 58930
  misc_feature: 730 for SV(C|O) and mtDNA

SEQ ID NO: 71304 - DNA, 120 bp, Homo sapiens; identical to SEQ ID NO: 56586
  misc_feature: 730 for SV(C|O) and mtDNA

SEQ ID NO: 71305 - DNA, 120 bp, Homo sapiens; identical to SEQ ID NO: 60363
  misc_feature: 730 for SV(C|O) and mtDNA

SEQ ID NO: 71306 - DNA, 120 bp, Homo sapiens
  misc_feature: 730 for SV(C|O) and mtDNA
atccattgtcgcatccacctttattatcagtctcttccccacaacaatattcatgtgcctagaccaagaagttattatctcgaactgacactgagccacaacccaaacaacccagctctc

SEQ ID NO: 71307 - DNA, 120 bp, Homo sapiens
  misc_feature: 730 for SV(C|O) and mtDNA
gaagctgaataatttatgaaggagaggggtcagggttgattcgggaggatcctattggtgcgggggctttgtatgattatgggcgttgattagtagtagttactggttgaacattgtttg

SEQ ID NO: 71308 - DNA, 120 bp, Homo sapiens
  misc_feature: 730 for SV(C|O) and mtDNA
cctccctgtacgaaaggacaagagaaataaggcctacttcacaaagcgccttcccccgtaaatgatatcatctcaacttagtattatacccacacccacccaagaacagggtttgttaag

SEQ ID NO: 71309 - DNA, 120 bp, Homo sapiens; identical to SEQ ID NO: 52643
  misc_feature: 730 for SV(C|O) and mtDNA

SEQ ID NO: 71310 - DNA, 120 bp, Homo sapiens
  misc_feature: 730 for SV(C|O) and mtDNA
ctacgcatttatatagaggagacaagtcgtaacatggtaagtgtactggaaagtgcacttggacgaaccagagtgtagcttaacacaaagcacccaacttacacttaggagatttcaact

SEQ ID NO: 71311 - DNA, 120 bp, Homo sapiens
  misc_feature: 730 for SV(C|O) and mtDNA
acctaaacctactccaatgctaaaactaatcgtcccaacaattatattactaccactgacatgactttccaaaaaacacataatttgaatcaacacaaccacccacagcctaattattag

SEQ ID NO: 71312 - DNA, 120 bp, Homo sapiens
  misc_feature: 730 for SV(C|O) and mtDNA
agcgaaaagtcctaatagtagaagaaccctccataaacctggagtgactatatggatgccccccaccctaccacacattcgaagaacccgtatacataaaatctagacaaaaaaggaagg

SEQ ID NO: 71313 - DNA, 120 bp, Homo sapiens; identical to SEQ ID NO: 53293
  misc_feature: 730 for SV(C|O) and mtDNA

SEQ ID NO: 71314 - DNA, 120 bp, Homo sapiens
  misc_feature: 730 for SV(C|O) and mtDNA
aaccctcgttccacagaagctgccatcaagtatttcctcacgcaagcaaccgcatccataatccttctaatagctatcctcttcaacaatatactctccggacaatgaaccataaccaat

SEQ ID NO: 71315 - DNA, 120 bp, Homo sapiens; identical to SEQ ID NO: 59624
  misc_feature: 730 for SV(C|O) and mtDNA

SEQ ID NO: 71316 - DNA, 120 bp, Homo sapiens; identical to SEQ ID NO: 58199
  misc_feature: 729 for SV(C|O) and mtDNA

SEQ ID NO: 71317 - DNA, 120 bp, Homo sapiens
  misc_feature: 729 for SV(C|O) and mtDNA
gggcggtgtgtacgcgcttcagggccctgttcaactaagcactctactctcagtttactgctaaatccaccttcgacccttaagtttcataagggctatcgtagttttctggggtagaaa

SEQ ID NO: 71318 - DNA, 120 bp, Homo sapiens; identical to SEQ ID NO: 54492
  misc_feature: 729 for SV(C|O) and mtDNA

SEQ ID NO: 71319 - DNA, 120 bp, Homo sapiens
  misc_feature: 729 for SV(C|O) and mtDNA
aaaccctcgttccacagaagctgccatcaagtatttcctcacgcaagcaaccgcatccataatccttctaatagctatcctcttcaacaatatactctccggacaatgaaccataaccaa

SEQ ID NO: 71320 - DNA, 120 bp, Homo sapiens
  misc_feature: 729 for SV(C|O) and mtDNA
ttcttcaaatatctactcatcttcctaattaccatactaatcttagttaccgctaacaacctattccaactgttcatcggctgagagggcgtaggaattatatccttcttgctcatcagt

SEQ ID NO: 71321 - DNA, 120 bp, Homo sapiens
  misc_feature: 729 for SV(C|O) and mtDNA
ctcccttcaccatttccgacggcatctacggctcaacattttttgtagccacaggcttccacggacttcacgtcattattggctcaactttcctcactatctgcttcatccgccaactaa

SEQ ID NO: 71322 - DNA, 120 bp, Homo sapiens
  misc_feature: 729 for SV(C|O) and mtDNA
gctataatgaacagtgatagtattattccttctaggcatagtagggaggatatgaggtgtgagcggtatactagtattcctagaagtgagatggtaaatgctagtataatatttatgtaa

SEQ ID NO: 71323 - DNA, 120 bp, Homo sapiens
  misc_feature: 729 for SV(C|O) and mtDNA
ttaaagactttttctctgatttgtccttggaaaaaggttttcatctccggtttacaagactggtgtattagtttatactacaaggacaggcccatttgagtattttgttttcaattaggg

SEQ ID NO: 71324 - DNA, 120 bp, Homo sapiens
  misc_feature: 729 for SV(C|O) and mtDNA
tagaatcttagctttgggtgctaatggtggagttaaagactttttctctgatttgtccttggaaaaaggttttcatctccggtttacaagactggtgtattagtttatactacaaggaca

SEQ ID NO: 71325 - DNA, 120 bp, Homo sapiens
  misc_feature: 729 for SV(C|O) and mtDNA
tgactccctaaagcccatgtcgaagcccccatcgctgggtcaatagtacttgccgcagtactcttaaaactaggcggctatggtataatacgcctcacactcattctcaaccccctgaca

SEQ ID NO: 71326 - DNA, 120 bp, Homo sapiens
  misc_feature: 729 for SV(C|O) and mtDNA
tgtaaaatccattgtcgcatccacctttattatcagtctcttccccacaacaatattcatgtgcctagaccaagaagttattatctcgaactgacactgagccacaacccaaacaaccca

SEQ ID NO: 71327 - DNA, 120 bp, Homo sapiens
  misc_feature: 729 for SV(C|O) and mtDNA
ctagttattatcgaaaccatcagcctactcattcaaccaatagccctggccgtacgcctaaccgctaacattactgcaggccacctactcatgcacctaattggaagcgccaccctagca

SEQ ID NO: 71328 - DNA, 120 bp, Homo sapiens; identical to SEQ ID NO: 54814
  misc_feature: 729 for SV(C|O) and mtDNA

SEQ ID NO: 71329 - DNA, 120 bp, Homo sapiens
  misc_feature: 729 for SV(C|O) and mtDNA
cagtgagaattctatgatggaccatgtaacgaataatgctacagggatgaatattatggagaagtagtctagtttgaagcttagggagagctgggttgtttgggttgtggctcagtgtca

SEQ ID NO: 71330 - DNA, 120 bp, Homo sapiens
  misc_feature: 729 for SV(C|O) and mtDNA
tcttcaaatatctactcatcttcctaattaccatactaatcttagttaccgctaacaacctattccaactgttcatcggctgagagggcgtaggaattatatccttcttgctcatcagtt

SEQ ID NO: 71331 - DNA, 120 bp, Homo sapiens
  misc_feature: 729 for SV(C|O) and mtDNA
tctctctacaaggttttttcctagtgtccaaagagctgttcctctttggactaacagttaaatttacaaggggatttagagggttctgtgggcaaatttaaagttgaactaagattctat

SEQ ID NO: 71332 - DNA, 120 bp, Homo sapiens
  misc_feature: 729 for SV(C|O) and mtDNA
aagactttttctctgatttgtccttggaaaaaggttttcatctccggtttacaagactggtgtattagtttatactacaaggacaggcccatttgagtattttgttttcaattagggaga

SEQ ID NO: 71333 - DNA, 120 bp, Homo sapiens
  misc_feature: 729 for SV(C|O) and mtDNA
gcggtgggcctagccctactagtctcaatctccaacacatatggcctagactacgtacataacctaaacctactccaatgctaaaactaatcgtcccaacaattatattactaccactga

SEQ ID NO: 71334 - DNA, 120 bp, Homo sapiens
  misc_feature: 729 for SV(C|O) and mtDNA
agaagctgccatcaagtatttcctcacgcaagcaaccgcatccataatccttctaatagctatcctcttcaacaatatactctccggacaatgaaccataaccaatactaccaatcaata

SEQ ID NO: 71335 - DNA, 120 bp, Homo sapiens
  misc_feature: 729 for SV(C|O) and mtDNA
cccaattaggagggcactggcccccaacaggcatcaccccgctaaatcccctagaagtcccactcctaaacacatccgtattactcgcatcaggagtatcaatcacctgagctcaccata

SEQ ID NO: 71336 - DNA, 120 bp, Homo sapiens
  misc_feature: 729 for SV(C|O) and mtDNA
tagtataaaaggggagataggtaggagtagcgtggtaagggcgatgagtgtggggaggaatggggtgggttttgtatgttcaaactgtcattttatttttacgttgttagatatggggag

SEQ ID NO: 71337 - DNA, 120 bp, Homo sapiens
  misc_feature: 729 for SV(C|O) and mtDNA
agctataatgaacagtgatagtattattccttctaggcatagtagggaggatatgaggtgtgagcggtatactagtattcctagaagtgagatggtaaatgctagtataatatttatgta

SEQ ID NO: 71338 - DNA, 120 bp, Homo sapiens
  misc_feature: 729 for SV(C|O) and mtDNA
gtttaccaaaaacatcacctctagcatcaccagtattagaggcaccgcctgcccagtgacacatgtttaacggccgcggtaccctaaccgtgcaaaggtagcataatcacttgttcctta

SEQ ID NO: 71339 - DNA, 120 bp, Homo sapiens
  misc_feature: 729 for SV(C|O) and mtDNA
taactactactaatcaacgcccataatcatacaaagcccccgcaccaataggatcctcccgaatcaaccctgacccctctccttcataaattattcagcttcctacactattaaagttta

SEQ ID NO: 71340 - DNA, 120 bp, Homo sapiens
  misc_feature: 729 for SV(C|O) and mtDNA
aataattaggctgtgggtggttgtgttgattcaaattatgtgttttttggaaagtcatgtcagtggtagtaatataattgttgggacgattagttttagcattggagtaggtttaggtta

SEQ ID NO: 71341 - DNA, 120 bp, Homo sapiens
  misc_feature: 729 for SV(C|O) and mtDNA
gtttcatgtggtgtatgcatcggggtagtccgagtaacgtcggggcattccggataggccgagaaagtgttgtgggaagaaagttagatttacgccgatgaatatgatagtgaaatggat

SEQ ID NO: 71342 - DNA, 120 bp, Homo sapiens
  misc_feature: 729 for SV(C|O) and mtDNA
gttgtaaaaaactccagctgacacaaaatagactacgaaagtggctttaacatatctgaacacacaatagctaagacccaaactgggattagataccccactatgcttagccctaaacct

SEQ ID NO: 71343 - DNA, 120 bp, Homo sapiens; identical to SEQ ID NO: 55445
  misc_feature: 729 for SV(C|O) and mtDNA

SEQ ID NO: 71344 - DNA, 120 bp, Homo sapiens
  misc_feature: 729 for SV(C|O) and mtDNA
gtaggggcctacaacgttggggcctttgcgtagttgtatatagcctagaatttttcgttcggtaagcattaggaatgccattgcgattagaatgggtacaatgaggagtaggaggttggc

SEQ ID NO: 71345 - DNA, 120 bp, Homo sapiens
  misc_feature: 729 for SV(C|O) and mtDNA
gtagctataatgaacagtgatagtattattccttctaggcatagtagggaggatatgaggtgtgagcggtatactagtattcctagaagtgagatggtaaatgctagtataatatttatg

SEQ ID NO: 71346 - DNA, 120 bp, Homo sapiens; identical to SEQ ID NO: 60033
  misc_feature: 729 for SV(C|O) and mtDNA

SEQ ID NO: 71347 - DNA, 120 bp, Homo sapiens
  misc_feature: 729 for SV(C|O) and mtDNA
ggtttcggttgttttctattagactatggtgagctcaggtgattgatactcctgatgcgagtaatacggatgtgtttaggagtgggacttctaggggatttagcggggtgatgcctgttg

SEQ ID NO: 71348 - DNA, 120 bp, Homo sapiens; identical to SEQ ID NO: 54481
  misc_feature: 729 for SV(C|O) and mtDNA

SEQ ID NO: 71349 - DNA, 120 bp, Homo sapiens
  misc_feature: 729 for SV(C|O) and mtDNA
aacctggagtgactatatggatgccccccaccctaccacacattcgaagaacccgtatacataaaatctagacaaaaaaggaaggaatcgaaccccccaaagctggtttcaagccaaccc

SEQ ID NO: 71350 - DNA, 120 bp, Homo sapiens; identical to SEQ ID NO: 60171
  misc_feature: 729 for SV(C|O) and mtDNA

SEQ ID NO: 71351 - DNA, 120 bp, Homo sapiens
  misc_feature: 729 for SV(C|O) and mtDNA
gcccactaagccaatcactttattgactcctagccgcagacctcctcattctaacctgaatcggaggacaaccagtaagctacccttttaccatcattggacaagtagcatccgtactat

SEQ ID NO: 71352 - DNA, 120 bp, Homo sapiens
  misc_feature: 729 for SV(C|O) and mtDNA
atcctgcgaagaaaaaaacttctgaggtaataaataggattatcccgtatcgaaggcctttttggacaggtggtgtgtggtggccttggtatgtgctttctcgtgttacatcgcgccatc

SEQ ID NO: 71353 - DNA, 120 bp, Homo sapiens
  misc_feature: 729 for SV(C|O) and mtDNA
ccccgacgttactcggactaccccgatgcatacaccacatgaaacatcctatcatctgtaggctcattcatttctctaacagcagtaatattaataattttcatgatttgagaagccttc

SEQ ID NO: 71354 - DNA, 120 bp, Homo sapiens
  misc_feature: 729 for SV(C|O) and mtDNA
ctttttctctgatttgtccttggaaaaaggttttcatctccggtttacaagactggtgtattagtttatactacaaggacaggcccatttgagtattttgttttcaattagggagatagt

SEQ ID NO: 71355 - DNA, 120 bp, Homo sapiens; identical to SEQ ID NO: 61249
  misc_feature: 729 for SV(C|O) and mtDNA

SEQ ID NO: 71356 - DNA, 120 bp, Homo sapiens
  misc_feature: 729 for SV(C|O) and mtDNA
cggtaagcattaggaatgccattgcgattagaatgggtacaatgaggagtaggaggttggccatgggtatgttgttaagaagaggaattgaacctctgactgtaaagttttaagttttat

SEQ ID NO: 71357 - DNA, 120 bp, Homo sapiens; identical to SEQ ID NO: 61845
  misc_feature: 729 for SV(C|O) and mtDNA

SEQ ID NO: 71358 - DNA, 120 bp, Homo sapiens
  misc_feature: 729 for SV(C|O) and mtDNA
cagaagctgccatcaagtatttcctcacgcaagcaaccgcatccataatccttctaatagctatcctcttcaacaatatactctccggacaatgaaccataaccaatactaccaatcaat

SEQ ID NO: 71359 - DNA, 120 bp, Homo sapiens; identical to SEQ ID NO: 55412
  misc_feature: 729 for SV(C|O) and mtDNA

SEQ ID NO: 71360 - DNA, 120 bp, Homo sapiens
  misc_feature: 729 for SV(C|O) and mtDNA
acctccccaccccatccaacatctccgcatgatgaaacttcggctcactccttggcgcctgcctgatcctccaaatcaccacaggactattcctagccatgcactactcaccagacgcct

SEQ ID NO: 71361 - DNA, 120 bp, Homo sapiens; identical to SEQ ID NO: 52237
  misc_feature: 729 for SV(C|O) and mtDNA

SEQ ID NO: 71362 - DNA, 120 bp, Homo sapiens; identical to SEQ ID NO: 56886
  misc_feature: 729 for SV(C|O) and mtDNA

SEQ ID NO: 71363 - DNA, 120 bp, Homo sapiens
  misc_feature: 729 for SV(C|O) and mtDNA
aataggagcttaaacccccttatttctaggactatgagaatcgaacccatccctgagaatccaaaattctccgtgccacctatcacaccccatcctaaagtaaggtcagctaaataagct

SEQ ID NO: 71364 - DNA, 120 bp, Homo sapiens
  misc_feature: 729 for SV(C|O) and mtDNA
aagctgaataatttatgaaggagaggggtcagggttgattcgggaggatcctattggtgcgggggctttgtatgattatgggcgttgattagtagtagttactggttgaacattgtttgt

SEQ ID NO: 71365 - DNA, 120 bp, Homo sapiens; identical to SEQ ID NO: 57287
  misc_feature: 729 for SV(C|O) and mtDNA

SEQ ID NO: 71366 - DNA, 120 bp, Homo sapiens
  misc_feature: 728 for SV(C|O) and mtDNA
aaacccactccaccttactaccagacaaccttagccaaaccatttacccaaataaagtataggcgatagaaattgaaacctggcgcaatagatatagtaccgcaagggaaagatgaaaaa

SEQ ID NO: 71367 - DNA, 120 bp, Homo sapiens; identical to SEQ ID NO: 57709
  misc_feature: 728 for SV(C|O) and mtDNA

SEQ ID NO: 71368 - DNA, 120 bp, Homo sapiens
  misc_feature: 728 for SV(C|O) and mtDNA
agcatttaccatctcacttctaggaatactagtataccgctcacacctcatatcctccctactatgcctagaaggaataatactatcactgttcattatagctactctcataaccctcaa

SEQ ID NO: 71369 - DNA, 120 bp, Homo sapiens
  misc_feature: 728 for SV(C|O) and mtDNA
aaccaagcataatacagcaaggactaacccctataccttctgcataatgaattaactagaaataactttgcaaggagagccaaagctaagacccccgaaaccagacgagctacctaagaa

SEQ ID NO: 71370 - DNA, 120 bp, Homo sapiens; identical to SEQ ID NO: 52190
  misc_feature: 728 for SV(C|O) and mtDNA

SEQ ID NO: 71371 - DNA, 120 bp, Homo sapiens; identical to SEQ ID NO: 54189
  misc_feature: 728 for SV(C|O) and mtDNA

SEQ ID NO: 71372 - DNA, 120 bp, Homo sapiens
  misc_feature: 728 for SV(C|O) and mtDNA
caccaaccacccaactatctataaacctagccatggccatccccttatgagcgggcgcagtgattataggctttcgctctaagattaaaaatgccctagcccacttcttaccacaaggca

SEQ ID NO: 71373 - DNA, 120 bp, Homo sapiens; identical to SEQ ID NO: 57009
  misc_feature: 728 for SV(C|O) and mtDNA

SEQ ID NO: 71374 - DNA, 120 bp, Homo sapiens
  misc_feature: 728 for SV(C|O) and mtDNA
tgagagtagctataatgaacagtgatagtattattccttctaggcatagtagggaggatatgaggtgtgagcggtatactagtattcctagaagtgagatggtaaatgctagtataatat

SEQ ID NO: 71375 - DNA, 120 bp, Homo sapiens; identical to SEQ ID NO: 56072
  misc_feature: 728 for SV(C|O) and mtDNA

SEQ ID NO: 71376 - DNA, 120 bp, Homo sapiens
  misc_feature: 728 for SV(C|O) and mtDNA
tatgtgttggagattgagactagtagggctaggcccaccgctgcttcgcaggcggcaaagactagtatggcaataggcacaatattggctaagagggagtgggtgttgagggttatgaga

SEQ ID NO: 71377 - DNA, 120 bp, Homo sapiens; identical to SEQ ID NO: 52657
  misc_feature: 728 for SV(C|O) and mtDNA

SEQ ID NO: 71378 - DNA, 120 bp, Homo sapiens
  misc_feature: 728 for SV(C|O) and mtDNA
gtattaggattaggattgttgtgaagtatagtacggatgctacttgtccaatgatggtaaaagggtagcttactggttgtcctccgattcaggttagaatgaggaggtctgcggctagga

SEQ ID NO: 71379 - DNA, 120 bp, Homo sapiens
  misc_feature: 728 for SV(C|O) and mtDNA
tatgcacattttatttctccaacatactcggattctaccctaccatcacacaccgcacaatcccctatctaggccttcttacgagccaaaacctgcccctactcctcctagacctaacct

SEQ ID NO: 71380 - DNA, 120 bp, Homo sapiens
  misc_feature: 728 for SV(C|O) and mtDNA
gtttatatatcacagtgagaattctatgatggaccatgtaacgaataatgctacagggatgaatattatggagaagtagtctagtttgaagcttagggagagctgggttgtttgggttgt

SEQ ID NO: 71381 - DNA, 120 bp, Homo sapiens
  misc_feature: 728 for SV(C|O) and mtDNA
aataaaccctcgttccacagaagctgccatcaagtatttcctcacgcaagcaaccgcatccataatccttctaatagctatcctcttcaacaatatactctccggacaatgaaccataac

SEQ ID NO: 71382 - DNA, 120 bp, Homo sapiens
  misc_feature: 728 for SV(C|O) and mtDNA
cattctatttccccctctattgatccccacctccaaatatctcatcaacaaccgactaatcaccacccaacaatgactaatcaaactaacctcaaaacaaatgataaccatacacaacac

SEQ ID NO: 71383 - DNA, 120 bp, Homo sapiens
  misc_feature: 728 for SV(C|O) and mtDNA
agcccacttcttaccacaaggcacacctacaccccttatccccatactagttattatcgaaaccatcagcctactcattcaaccaatagccctggccgtacgcctaaccgctaacattac

SEQ ID NO: 71384 - DNA, 120 bp, Homo sapiens
  misc_feature: 728 for SV(C|O) and mtDNA
gggcctacaacgttggggcctttgcgtagttgtatatagcctagaatttttcgttcggtaagcattaggaatgccattgcgattagaatgggtacaatgaggagtaggaggttggccatg

SEQ ID NO: 71385 - DNA, 120 bp, Homo sapiens
  misc_feature: 728 for SV(C|O) and mtDNA
attaccttcttattatttgatctagaaattgccctccttttacccctaccatgagccctacaaacaactaacctaccactaatagttatgtcatccctcttattaatcatcatcctagcc

SEQ ID NO: 71386 - DNA, 120 bp, Homo sapiens
  misc_feature: 728 for SV(C|O) and mtDNA
caaatctccttaattataacattcacagccacagaactaatcatattttatatcttcttcgaaaccacacttatccccaccttggctatcatcacccgatgaggcaaccagccagaacgc

SEQ ID NO: 71387 - DNA, 120 bp, Homo sapiens
  misc_feature: 728 for SV(C|O) and mtDNA
gcccacttcttaccacaaggcacacctacaccccttatccccatactagttattatcgaaaccatcagcctactcattcaaccaatagccctggccgtacgcctaaccgctaacattact

SEQ ID NO: 71388 - DNA, 120 bp, Homo sapiens; identical to SEQ ID NO: 57787
  misc_feature: 728 for SV(C|O) and mtDNA

SEQ ID NO: 71389 - DNA, 120 bp, Homo sapiens
  misc_feature: 728 for SV(C|O) and mtDNA
cgacggcatctacggctcaacattttttgtagccacaggcttccacggacttcacgtcattattggctcaactttcctcactatctgcttcatccgccaactaatatttcactttacatc

SEQ ID NO: 71390 - DNA, 120 bp, Homo sapiens
  misc_feature: 728 for SV(C|O) and mtDNA
cttcttcgaatttgcaattcaatatgaaaatcacctcggagctggtaaaaagaggcctaacccctgtctttagatttacagtccaatgcttcactcagccattttacctcacccccactg

SEQ ID NO: 71391 - DNA, 120 bp, Homo sapiens
  misc_feature: 728 for SV(C|O) and mtDNA
agtgagaattctatgatggaccatgtaacgaataatgctacagggatgaatattatggagaagtagtctagtttgaagcttagggagagctgggttgtttgggttgtggctcagtgtcag

SEQ ID NO: 71392 - DNA, 120 bp, Homo sapiens
  misc_feature: 728 for SV(C|O) and mtDNA
ccactcaccctagcattacttatatgatatgtctccatacccattacaatctccagcattccccctcaaacctaagaaatatgtctgataaaagagttactttgatagagtaaataatag

SEQ ID NO: 71393 - DNA, 120 bp, Homo sapiens
  misc_feature: 728 for SV(C|O) and mtDNA
ctaataatcttatagaaatttaggttaaatacagaccaagagccttcaaagccctcagtaagttgcaatacttaatttctgtaacagctaaggactgcaaaaccccactctgcatcaact

SEQ ID NO: 71394 - DNA, 120 bp, Homo sapiens
  misc_feature: 728 for SV(C|O) and mtDNA
cctctatataaatgcgtaggggttttagttaaatgtcctttgaagtatacttgaggagggtgacgggcggtgtgtacgcgcttcagggccctgttcaactaagcactctactctcagttt

SEQ ID NO: 71395 - DNA, 120 bp, Homo sapiens
  misc_feature: 728 for SV(C|O) and mtDNA
actactccccatatctaacaacgtaaaaataaaatgacagtttgaacatacaaaacccaccccattcctccccacactcatcgcccttaccacgctactcctacctatctccccttttat

SEQ ID NO: 71396 - DNA, 120 bp, Homo sapiens; identical to SEQ ID NO: 54306
  misc_feature: 727 for SV(C|O) and mtDNA

SEQ ID NO: 71397 - DNA, 120 bp, Homo sapiens
  misc_feature: 727 for SV(C|O) and mtDNA
tgagttgtaaaaaactccagctgacacaaaatagactacgaaagtggctttaacatatctgaacacacaatagctaagacccaaactgggattagataccccactatgcttagccctaaa

SEQ ID NO: 71398 - DNA, 120 bp, Homo sapiens
  misc_feature: 727 for SV(C|O) and mtDNA
ctataatgaacagtgatagtattattccttctaggcatagtagggaggatatgaggtgtgagcggtatactagtattcctagaagtgagatggtaaatgctagtataatatttatgtaaa

SEQ ID NO: 71399 - DNA, 120 bp, Homo sapiens
  misc_feature: 727 for SV(C|O) and mtDNA
ggggggcatccatatagtcactccaggtttatggagggttcttctactattaggacttttcgcttcgaagcgaaggcttctcaaatcatgaaaattattaatattactgctgttagagaa

SEQ ID NO: 71400 - DNA, 120 bp, Homo sapiens
  misc_feature: 727 for SV(C|O) and mtDNA
ccccaacaggcatcaccccgctaaatcccctagaagtcccactcctaaacacatccgtattactcgcatcaggagtatcaatcacctgagctcaccatagtctaatagaaaacaaccgaa

SEQ ID NO: 71401 - DNA, 120 bp, Homo sapiens
  misc_feature: 727 for SV(C|O) and mtDNA
gggctaggatgatgattaataagagggatgacataactattagtggtaggttagttgtttgtagggctcatggtaggggtaaaaggagggcaatttctagatcaaataataagaaggtaa

SEQ ID NO: 71402 - DNA, 120 bp, Homo sapiens
  misc_feature: 727 for SV(C|O) and mtDNA
ctcggattctaccctaccatcacacaccgcacaatcccctatctaggccttcttacgagccaaaacctgcccctactcctcctagacctaacctgactagaaaagctattacctaaaaca

SEQ ID NO: 71403 - DNA, 120 bp, Homo sapiens
  misc_feature: 727 for SV(C|O) and mtDNA
cattatgtaaaatccattgtcgcatccacctttattatcagtctcttccccacaacaatattcatgtgcctagaccaagaagttattatctcgaactgacactgagccacaacccaaaca

SEQ ID NO: 71404 - DNA, 120 bp, Homo sapiens; identical to SEQ ID NO: 53622
  misc_feature: 727 for SV(C|O) and mtDNA

SEQ ID NO: 71405 - DNA, 120 bp, Homo sapiens; identical to SEQ ID NO: 53225
  misc_feature: 727 for SV(C|O) and mtDNA

SEQ ID NO: 71406 - DNA, 120 bp, Homo sapiens
  misc_feature: 727 for SV(C|O) and mtDNA
tgccccccaccctaccacacattcgaagaacccgtatacataaaatctagacaaaaaaggaaggaatcgaaccccccaaagctggtttcaagccaaccccatggcctccatgactttttc

SEQ ID NO: 71407 - DNA, 120 bp, Homo sapiens
  misc_feature: 727 for SV(C|O) and mtDNA
ggtttcaagccaaccccatggcctccatgactttttcaaaaaggtattagaaaaaccatttcataactttgtcaaagttaaattataggctaaatcctatatatcttaatggcacatgca

SEQ ID NO: 71408 - DNA, 120 bp, Homo sapiens; identical to SEQ ID NO: 55933
  misc_feature: 727 for SV(C|O) and mtDNA

SEQ ID NO: 71409 - DNA, 120 bp, Homo sapiens; identical to SEQ ID NO: 60570
  misc_feature: 727 for SV(C|O) and mtDNA

SEQ ID NO: 71410 - DNA, 120 bp, Homo sapiens; identical to SEQ ID NO: 56288
  misc_feature: 727 for SV(C|O) and mtDNA

SEQ ID NO: 71411 - DNA, 120 bp, Homo sapiens
  misc_feature: 727 for SV(C|O) and mtDNA
taagctcctattatttactctatcaaagtaactcttttatcagacatatttcttaggtttgagggggaatgctggagattgtaatgggtatggagacatatcatataagtaatgctaggg

SEQ ID NO: 71412 - DNA, 120 bp, Homo sapiens
  misc_feature: 727 for SV(C|O) and mtDNA
cttctaggaatactagtataccgctcacacctcatatcctccctactatgcctagaaggaataatactatcactgttcattatagctactctcataaccctcaacacccactccctctta

SEQ ID NO: 71413 - DNA, 120 bp, Homo sapiens
  misc_feature: 727 for SV(C|O) and mtDNA
gtccgtaaagaggtatctttactataaaagctattgtgtaagctagtcatattaagttgttggctcaggagtttgatagttcttgggcagtgagagtgagtagtagaatgtttagtgagc

SEQ ID NO: 71414 - DNA, 120 bp, Homo sapiens; identical to SEQ ID NO: 54887
  misc_feature: 727 for SV(C|O) and mtDNA

SEQ ID NO: 71415 - DNA, 120 bp, Homo sapiens
  misc_feature: 727 for SV(C|O) and mtDNA
gataaaagagttactttgatagagtaaataataggagcttaaacccccttatttctaggactatgagaatcgaacccatccctgagaatccaaaattctccgtgccacctatcacacccc

SEQ ID NO: 71416 - DNA, 120 bp, Homo sapiens; identical to SEQ ID NO: 57812
  misc_feature: 727 for SV(C|O) and mtDNA

SEQ ID NO: 71417 - DNA, 120 bp, Homo sapiens
  misc_feature: 727 for SV(C|O) and mtDNA
ccattgtcgcatccacctttattatcagtctcttccccacaacaatattcatgtgcctagaccaagaagttattatctcgaactgacactgagccacaacccaaacaacccagctctccc

SEQ ID NO: 71418 - DNA, 120 bp, Homo sapiens
  misc_feature: 727 for SV(C|O) and mtDNA
gcattattcgttacatggtccatcatagaattctcactgtgatatataaactcagacccaaacattaatcagttcttcaaatatctactcatcttcctaattaccatactaatcttagtt

SEQ ID NO: 71419 - DNA, 120 bp, Homo sapiens; identical to SEQ ID NO: 58997
  misc_feature: 727 for SV(C|O) and mtDNA

SEQ ID NO: 71420 - DNA, 120 bp, Homo sapiens
  misc_feature: 727 for SV(C|O) and mtDNA
ctgtttaccaaaaacatcacctctagcatcaccagtattagaggcaccgcctgcccagtgacacatgtttaacggccgcggtaccctaaccgtgcaaaggtagcataatcacttgttcct

SEQ ID NO: 71421 - DNA, 120 bp, Homo sapiens
  misc_feature: 727 for SV(C|O) and mtDNA
agcggtgggcctagccctactagtctcaatctccaacacatatggcctagactacgtacataacctaaacctactccaatgctaaaactaatcgtcccaacaattatattactaccactg

SEQ ID NO: 71422 - DNA, 120 bp, Homo sapiens; identical to SEQ ID NO: 56683
  misc_feature: 727 for SV(C|O) and mtDNA

SEQ ID NO: 71423 - DNA, 120 bp, Homo sapiens
  misc_feature: 727 for SV(C|O) and mtDNA
aattatttggtttcggttgttttctattagactatggtgagctcaggtgattgatactcctgatgcgagtaatacggatgtgtttaggagtgggacttctaggggatttagcggggtgat

SEQ ID NO: 71424 - DNA, 120 bp, Homo sapiens
  misc_feature: 727 for SV(C|O) and mtDNA
agccgtagatgccgtcggaaatggtgaagggagactcgaagtactctgaggcttgtaggagggtaaaatagagacccagtaaaattgtaataagcagtgcttgaattatttggtttcggt

SEQ ID NO: 71425 - DNA, 120 bp, Homo sapiens
  misc_feature: 726 for SV(C|O) and mtDNA
ttgaagaactgattaatgtttgggtctgagtttatatatcacagtgagaattctatgatggaccatgtaacgaataatgctacagggatgaatattatggagaagtagtctagtttgaag

SEQ ID NO: 71426 - DNA, 120 bp, Homo sapiens
  misc_feature: 726 for SV(C|O) and mtDNA
ccccccaccctaccacacattcgaagaacccgtatacataaaatctagacaaaaaaggaaggaatcgaaccccccaaagctggtttcaagccaaccccatggcctccatgactttttcaa

SEQ ID NO: 71427 - DNA, 120 bp, Homo sapiens; identical to SEQ ID NO: 58334
  misc_feature: 726 for SV(C|O) and mtDNA

SEQ ID NO: 71428 - DNA, 120 bp, Homo sapiens
  misc_feature: 726 for SV(C|O) and mtDNA
catactcggattctaccctaccatcacacaccgcacaatcccctatctaggccttcttacgagccaaaacctgcccctactcctcctagacctaacctgactagaaaagctattacctaa

SEQ ID NO: 71429 - DNA, 120 bp, Homo sapiens
  misc_feature: 726 for SV(C|O) and mtDNA
ccctaaagcccatgtcgaagcccccatcgctgggtcaatagtacttgccgcagtactcttaaaactaggcggctatggtataatacgcctcacactcattctcaaccccctgacaaaaca

SEQ ID NO: 71430 - DNA, 120 bp, Homo sapiens
  misc_feature: 726 for SV(C|O) and mtDNA
ggtagcataatcacttgttccttaaatagggacctgtatgaatggctccacgagggttcagctgtctcttacttttaaccagtgaaattgacctgcccgtgaagaggcgggcatgacaca

SEQ ID NO: 71431 - DNA, 120 bp, Homo sapiens; identical to SEQ ID NO: 52531
  misc_feature: 726 for SV(C|O) and mtDNA

SEQ ID NO: 71432 - DNA, 120 bp, Homo sapiens; identical to SEQ ID NO: 60017
  misc_feature: 726 for SV(C|O) and mtDNA

SEQ ID NO: 71433 - DNA, 120 bp, Homo sapiens; identical to SEQ ID NO: 54681
  misc_feature: 726 for SV(C|O) and mtDNA

SEQ ID NO: 71434 - DNA, 120 bp, Homo sapiens
  misc_feature: 726 for SV(C|O) and mtDNA
ataaattaaaaaaactattaaacccatataacctcccccaaaattcagaataataacacacccgaccacaccgctaacaatcaatactaaacccccataaataggagaaggcttagaaga

SEQ ID NO: 71435 - DNA, 120 bp, Homo sapiens
  misc_feature: 726 for SV(C|O) and mtDNA
cataatgaattaactagaaataactttgcaaggagagccaaagctaagacccccgaaaccagacgagctacctaagaacagctaaaagagcacacccgtctatgtagcaaaatagtggga

SEQ ID NO: 71436 - DNA, 120 bp, Homo sapiens; identical to SEQ ID NO: 52884
  misc_feature: 726 for SV(C|O) and mtDNA

SEQ ID NO: 71437 - DNA, 120 bp, Homo sapiens
  misc_feature: 726 for SV(C|O) and mtDNA
caaactagactacttctccataatattcatccctgtagcattattcgttacatggtccatcatagaattctcactgtgatatataaactcagacccaaacattaatcagttcttcaaata

SEQ ID NO: 71438 - DNA, 120 bp, Homo sapiens; identical to SEQ ID NO: 60774
  misc_feature: 726 for SV(C|O) and mtDNA

SEQ ID NO: 71439 - DNA, 120 bp, Homo sapiens; identical to SEQ ID NO: 55193
  misc_feature: 726 for SV(C|O) and mtDNA

SEQ ID NO: 71440 - DNA, 120 bp, Homo sapiens; identical to SEQ ID NO: 53338
  misc_feature: 726 for SV(C|O) and mtDNA

SEQ ID NO: 71441 - DNA, 120 bp, Homo sapiens
  misc_feature: 726 for SV(C|O) and mtDNA
ctctctctacaaggttttttcctagtgtccaaagagctgttcctctttggactaacagttaaatttacaaggggatttagagggttctgtgggcaaatttaaagttgaactaagattcta

SEQ ID NO: 71442 - DNA, 120 bp, Homo sapiens
  misc_feature: 726 for SV(C|O) and mtDNA
taaataggttgttgttgatttggttaaaaaatagtagagggatgatgctaataattaggctgtgggtggttgtgttgattcaaattatgtgttttttggaaagtcatgtcagtggtagta

SEQ ID NO: 71443 - DNA, 120 bp, Homo sapiens
  misc_feature: 726 for SV(C|O) and mtDNA
gaagcagatttgggtgccacccaagtattgactcacccatcaacaaccgctatgtaattcgtacattactgccagccaccatgaatattgtacggtaccataaatacttgaccacctgta

SEQ ID NO: 71444 - DNA, 120 bp, Homo sapiens; identical to SEQ ID NO: 51728
  misc_feature: 726 for SV(C|O) and mtDNA

SEQ ID NO: 71445 - DNA, 120 bp, Homo sapiens; identical to SEQ ID NO: 52942
  misc_feature: 726 for SV(C|O) and mtDNA

SEQ ID NO: 71446 - DNA, 120 bp, Homo sapiens
  misc_feature: 726 for SV(C|O) and mtDNA
ctctatataaatgcgtaggggttttagttaaatgtcctttgaagtatacttgaggagggtgacgggcggtgtgtacgcgcttcagggccctgttcaactaagcactctactctcagttta

SEQ ID NO: 71447 - DNA, 120 bp, Homo sapiens
  misc_feature: 726 for SV(C|O) and mtDNA
gtgaggggtggctttggagttgcagttgatgtgtgatagttgagggttgattgctgtacttgcttgtaagcatggggagggggttttgatgtggattgggtttttatgtactacaggtgg

SEQ ID NO: 71448 - DNA, 120 bp, Homo sapiens
  misc_feature: 726 for SV(C|O) and mtDNA
gtaatgtgctatgtacggtaaatggctttatgtactatgtgctgttaagggtgagtaggtttgttggtatcctagtgggtgaggggtggctttggagttgcagttgatgtgtgatagttg

SEQ ID NO: 71449 - DNA, 120 bp, Homo sapiens; identical to SEQ ID NO: 58114
  misc_feature: 726 for SV(C|O) and mtDNA

SEQ ID NO: 71450 - DNA, 120 bp, Homo sapiens
  misc_feature: 726 for SV(C|O) and mtDNA
acaccaaccacccaactatctataaacctagccatggccatccccttatgagcgggcgcagtgattataggctttcgctctaagattaaaaatgccctagcccacttcttaccacaaggc

SEQ ID NO: 71451 - DNA, 120 bp, Homo sapiens
  misc_feature: 726 for SV(C|O) and mtDNA
ctaaaaaatcccaaacatataactgaactcctcacacccaattggaccaatctatcaccctatagaagaactaatgttagtataagtaacatgaaaacattctcctccgcataagcctgc

SEQ ID NO: 71452 - DNA, 120 bp, Homo sapiens
  misc_feature: 726 for SV(C|O) and mtDNA
cctccccaccccatccaacatctccgcatgatgaaacttcggctcactccttggcgcctgcctgatcctccaaatcaccacaggactattcctagccatgcactactcaccagacgcctc

SEQ ID NO: 71453 - DNA, 120 bp, Homo sapiens
  misc_feature: 726 for SV(C|O) and mtDNA
cttcaaatatctactcatcttcctaattaccatactaatcttagttaccgctaacaacctattccaactgttcatcggctgagagggcgtaggaattatatccttcttgctcatcagttg

SEQ ID NO: 71454 - DNA, 120 bp, Homo sapiens
  misc_feature: 726 for SV(C|O) and mtDNA
aatgtgctatgtacggtaaatggctttatgtactatgtgctgttaagggtgagtaggtttgttggtatcctagtgggtgaggggtggctttggagttgcagttgatgtgtgatagttgag

SEQ ID NO: 71455 - DNA, 120 bp, Homo sapiens
  misc_feature: 726 for SV(C|O) and mtDNA
cgaaggcctttttggacaggtggtgtgtggtggccttggtatgtgctttctcgtgttacatcgcgccatcattggtatatggttagtgtgttggttagtaggcctagtatgaggagcgtt

SEQ ID NO: 71456 - DNA, 120 bp, Homo sapiens
  misc_feature: 726 for SV(C|O) and mtDNA
cctaataaaattaattaaccactcattcatcgacctccccaccccatccaacatctccgcatgatgaaacttcggctcactccttggcgcctgcctgatcctccaaatcaccacaggact

SEQ ID NO: 71457 - DNA, 120 bp, Homo sapiens; identical to SEQ ID NO: 52507
  misc_feature: 726 for SV(C|O) and mtDNA

SEQ ID NO: 71458 - DNA, 120 bp, Homo sapiens; identical to SEQ ID NO: 52706
  misc_feature: 726 for SV(C|O) and mtDNA

SEQ ID NO: 71459 - DNA, 120 bp, Homo sapiens
  misc_feature: 726 for SV(C|O) and mtDNA
atttccgacggcatctacggctcaacattttttgtagccacaggcttccacggacttcacgtcattattggctcaactttcctcactatctgcttcatccgccaactaatatttcacttt

SEQ ID NO: 71460 - DNA, 120 bp, Homo sapiens; identical to SEQ ID NO: 58818
  misc_feature: 726 for SV(C|O) and mtDNA

SEQ ID NO: 71461 - DNA, 120 bp, Homo sapiens; identical to SEQ ID NO: 55634
  misc_feature: 726 for SV(C|O) and mtDNA

SEQ ID NO: 71462 - DNA, 120 bp, Homo sapiens
  misc_feature: 726 for SV(C|O) and mtDNA
acggactacaaccacgaccaatgatatgaaaaaccatcgttgtatttcaactacaagaacaccaatgaccccaatacgcaaaattaaccccctaataaaattaattaaccactcattcat

SEQ ID NO: 71463 - DNA, 120 bp, Homo sapiens
  misc_feature: 726 for SV(C|O) and mtDNA
agactttttctctgatttgtccttggaaaaaggttttcatctccggtttacaagactggtgtattagtttatactacaaggacaggcccatttgagtattttgttttcaattagggagat

SEQ ID NO: 71464 - DNA, 120 bp, Homo sapiens; identical to SEQ ID NO: 55474
  misc_feature: 726 for SV(C|O) and mtDNA

SEQ ID NO: 71465 - DNA, 120 bp, Homo sapiens
  misc_feature: 726 for SV(C|O) and mtDNA
agtataaaaggggagataggtaggagtagcgtggtaagggcgatgagtgtggggaggaatggggtgggttttgtatgttcaaactgtcattttatttttacgttgttagatatggggagt

SEQ ID NO: 71466 - DNA, 120 bp, Homo sapiens; identical to SEQ ID NO: 54652
  misc_feature: 726 for SV(C|O) and mtDNA

SEQ ID NO: 71467 - DNA, 120 bp, Homo sapiens
  misc_feature: 726 for SV(C|O) and mtDNA
aatctccttaattataacattcacagccacagaactaatcatattttatatcttcttcgaaaccacacttatccccaccttggctatcatcacccgatgaggcaaccagccagaacgcct

SEQ ID NO: 71468 - DNA, 120 bp, Homo sapiens
  misc_feature: 726 for SV(C|O) and mtDNA
agagtaaataataggagcttaaacccccttatttctaggactatgagaatcgaacccatccctgagaatccaaaattctccgtgccacctatcacaccccatcctaaagtaaggtcagct

SEQ ID NO: 71469 - DNA, 120 bp, Homo sapiens
  misc_feature: 725 for SV(C|O) and mtDNA
ggcactggcccccaacaggcatcaccccgctaaatcccctagaagtcccactcctaaacacatccgtattactcgcatcaggagtatcaatcacctgagctcaccatagtctaatagaaa

SEQ ID NO: 71470 - DNA, 120 bp, Homo sapiens
  misc_feature: 725 for SV(C|O) and mtDNA
ttagacatgggggcatgagttagcagttcttgtgagctttctcggtaaataaggggtcgtaagcctctgttgtcagattcacaatctgatgttttggttaaactatatttacaagaggaa

SEQ ID NO: 71471 - DNA, 120 bp, Homo sapiens
  misc_feature: 725 for SV(C|O) and mtDNA
tgtagtagcccgtaggggcctacaacgttggggcctttgcgtagttgtatatagcctagaatttttcgttcggtaagcattaggaatgccattgcgattagaatgggtacaatgaggagt

SEQ ID NO: 71472 - DNA, 120 bp, Homo sapiens
  misc_feature: 725 for SV(C|O) and mtDNA
tgtaatgtgctatgtacggtaaatggctttatgtactatgtgctgttaagggtgagtaggtttgttggtatcctagtgggtgaggggtggctttggagttgcagttgatgtgtgatagtt

SEQ ID NO: 71473 - DNA, 120 bp, Homo sapiens; identical to SEQ ID NO: 59872
  misc_feature: 725 for SV(C|O) and mtDNA

SEQ ID NO: 71474 - DNA, 120 bp, Homo sapiens
  misc_feature: 725 for SV(C|O) and mtDNA
ctccccaccccatccaacatctccgcatgatgaaacttcggctcactccttggcgcctgcctgatcctccaaatcaccacaggactattcctagccatgcactactcaccagacgcctca

SEQ ID NO: 71475 - DNA, 120 bp, Homo sapiens; identical to SEQ ID NO: 54682
  misc_feature: 725 for SV(C|O) and mtDNA

SEQ ID NO: 71476 - DNA, 120 bp, Homo sapiens
  misc_feature: 725 for SV(C|O) and mtDNA
tcctatcaataggagctgtatttgccatcataggaggcttcattcactgatttcccctattctcaggctacaccctagaccaaacctacgccaaaatccatttcactatcatattcatcg

SEQ ID NO: 71477 - DNA, 120 bp, Homo sapiens
  misc_feature: 725 for SV(C|O) and mtDNA
taatgtgctatgtacggtaaatggctttatgtactatgtgctgttaagggtgagtaggtttgttggtatcctagtgggtgaggggtggctttggagttgcagttgatgtgtgatagttga

SEQ ID NO: 71478 - DNA, 120 bp, Homo sapiens; identical to SEQ ID NO: 61671
  misc_feature: 725 for SV(C|O) and mtDNA

SEQ ID NO: 71479 - DNA, 120 bp, Homo sapiens
  misc_feature: 725 for SV(C|O) and mtDNA
tattaggattaggattgttgtgaagtatagtacggatgctacttgtccaatgatggtaaaagggtagcttactggttgtcctccgattcaggttagaatgaggaggtctgcggctaggag

SEQ ID NO: 71480 - DNA, 120 bp, Homo sapiens
  misc_feature: 725 for SV(C|O) and mtDNA
tatggcccaccataattacccccatactccttacactattcctcatcacccaactaaaaatattaaacacaaactaccacctacctccctcaccaaagcccataaaaataaaaaattata

SEQ ID NO: 71481 - DNA, 120 bp, Homo sapiens
  misc_feature: 725 for SV(C|O) and mtDNA
agacatcgtactacacgacacgtactacgttgtagctcacttccactatgtcctatcaataggagctgtatttgccatcataggaggcttcattcactgatttcccctattctcaggcta

SEQ ID NO: 71482 - DNA, 120 bp, Homo sapiens
  misc_feature: 725 for SV(C|O) and mtDNA
gtagtagcccgtaggggcctacaacgttggggcctttgcgtagttgtatatagcctagaatttttcgttcggtaagcattaggaatgccattgcgattagaatgggtacaatgaggagta

SEQ ID NO: 71483 - DNA, 120 bp, Homo sapiens; identical to SEQ ID NO: 54764
  misc_feature: 725 for SV(C|O) and mtDNA

SEQ ID NO: 71484 - DNA, 120 bp, Homo sapiens; identical to SEQ ID NO: 59986
  misc_feature: 725 for SV(C|O) and mtDNA

SEQ ID NO: 71485 - DNA, 120 bp, Homo sapiens
  misc_feature: 725 for SV(C|O) and mtDNA
gacatgggggcatgagttagcagttcttgtgagctttctcggtaaataaggggtcgtaagcctctgttgtcagattcacaatctgatgttttggttaaactatatttacaagaggaaaac

SEQ ID NO: 71486 - DNA, 120 bp, Homo sapiens
  misc_feature: 725 for SV(C|O) and mtDNA
atcattctatttccccctctattgatccccacctccaaatatctcatcaacaaccgactaatcaccacccaacaatgactaatcaaactaacctcaaaacaaatgataaccatacacaac

SEQ ID NO: 71487 - DNA, 120 bp, Homo sapiens; identical to SEQ ID NO: 52901
  misc_feature: 725 for SV(C|O) and mtDNA

SEQ ID NO: 71488 - DNA, 120 bp, Homo sapiens; identical to SEQ ID NO: 55544
  misc_feature: 725 for SV(C|O) and mtDNA

SEQ ID NO: 71489 - DNA, 120 bp, Homo sapiens
  misc_feature: 725 for SV(C|O) and mtDNA
cttcaaaggacatttaactaaaacccctacgcatttatatagaggagacaagtcgtaacatggtaagtgtactggaaagtgcacttggacgaaccagagtgtagcttaacacaaagcacc

SEQ ID NO: 71490 - DNA, 120 bp, Homo sapiens
  misc_feature: 725 for SV(C|O) and mtDNA
ggtctgagtttatatatcacagtgagaattctatgatggaccatgtaacgaataatgctacagggatgaatattatggagaagtagtctagtttgaagcttagggagagctgggttgttt

SEQ ID NO: 71491 - DNA, 120 bp, Homo sapiens
  misc_feature: 725 for SV(C|O) and mtDNA
ggcgaaatattatgctttgttgtttggatatatggaggatggggattattgctaggatgaggatggatagtaatagggcaaggacgcctcctagtttgttagggacggatcggagaattg

SEQ ID NO: 71492 - DNA, 120 bp, Homo sapiens; identical to SEQ ID NO: 58688
  misc_feature: 725 for SV(C|O) and mtDNA

SEQ ID NO: 71493 - DNA, 120 bp, Homo sapiens
  misc_feature: 725 for SV(C|O) and mtDNA
gactacttctccataatattcatccctgtagcattattcgttacatggtccatcatagaattctcactgtgatatataaactcagacccaaacattaatcagttcttcaaatatctactc

SEQ ID NO: 71494 - DNA, 120 bp, Homo sapiens
  misc_feature: 725 for SV(C|O) and mtDNA
aaatccattgtcgcatccacctttattatcagtctcttccccacaacaatattcatgtgcctagaccaagaagttattatctcgaactgacactgagccacaacccaaacaacccagctc

SEQ ID NO: 71495 - DNA, 120 bp, Homo sapiens
  misc_feature: 725 for SV(C|O) and mtDNA
aggggaagggagcctactagggtgtagaataggaagtatgtgcctgcgttcaggcgttctggctggttgcctcatcgggtgatgatagccaaggtggggataagtgtggtttcgaagaag

SEQ ID NO: 71496 - DNA, 120 bp, Homo sapiens; identical to SEQ ID NO: 52669
  misc_feature: 725 for SV(C|O) and mtDNA

SEQ ID NO: 71497 - DNA, 120 bp, Homo sapiens
  misc_feature: 725 for SV(C|O) and mtDNA
caccctaccacacattcgaagaacccgtatacataaaatctagacaaaaaaggaaggaatcgaaccccccaaagctggtttcaagccaaccccatggcctccatgactttttcaaaaagg

SEQ ID NO: 71498 - DNA, 120 bp, Homo sapiens
  misc_feature: 725 for SV(C|O) and mtDNA
aaccttagccaaaccatttacccaaataaagtataggcgatagaaattgaaacctggcgcaatagatatagtaccgcaagggaaagatgaaaaattataaccaagcataatacagcaagg

SEQ ID NO: 71499 - DNA, 120 bp, Homo sapiens
  misc_feature: 725 for SV(C|O) and mtDNA
cactcaccctagcattacttatatgatatgtctccatacccattacaatctccagcattccccctcaaacctaagaaatatgtctgataaaagagttactttgatagagtaaataatagg

SEQ ID NO: 71500 - DNA, 120 bp, Homo sapiens
  misc_feature: 725 for SV(C|O) and mtDNA
aataagcagtgcttgaattatttggtttcggttgttttctattagactatggtgagctcaggtgattgatactcctgatgcgagtaatacggatgtgtttaggagtgggacttctagggg

SEQ ID NO: 71501 - DNA, 120 bp, Homo sapiens
  misc_feature: 725 for SV(C|O) and mtDNA
aaaaaacttctgaggtaataaataggattatcccgtatcgaaggcctttttggacaggtggtgtgtggtggccttggtatgtgctttctcgtgttacatcgcgccatcattggtatatgg

SEQ ID NO: 71502 - DNA, 120 bp, Homo sapiens; identical to SEQ ID NO: 53933
  misc_feature: 725 for SV(C|O) and mtDNA

SEQ ID NO: 71503 - DNA, 120 bp, Homo sapiens
  misc_feature: 725 for SV(C|O) and mtDNA
atcacactactccccatatctaacaacgtaaaaataaaatgacagtttgaacatacaaaacccaccccattcctccccacactcatcgcccttaccacgctactcctacctatctcccct

SEQ ID NO: 71504 - DNA, 120 bp, Homo sapiens
  misc_feature: 725 for SV(C|O) and mtDNA
aatccattgtcgcatccacctttattatcagtctcttccccacaacaatattcatgtgcctagaccaagaagttattatctcgaactgacactgagccacaacccaaacaacccagctct

SEQ ID NO: 71505 - DNA, 120 bp, Homo sapiens
  misc_feature: 725 for SV(C|O) and mtDNA
actctctctacaaggttttttcctagtgtccaaagagctgttcctctttggactaacagttaaatttacaaggggatttagagggttctgtgggcaaatttaaagttgaactaagattct

SEQ ID NO: 71506 - DNA, 120 bp, Homo sapiens; identical to SEQ ID NO: 57532
  misc_feature: 725 for SV(C|O) and mtDNA

SEQ ID NO: 71507 - DNA, 120 bp, Homo sapiens
  misc_feature: 724 for SV(C|O) and mtDNA
ataatacagcaaggactaacccctataccttctgcataatgaattaactagaaataactttgcaaggagagccaaagctaagacccccgaaaccagacgagctacctaagaacagctaaa

SEQ ID NO: 71508 - DNA, 120 bp, Homo sapiens; identical to SEQ ID NO: 58229
  misc_feature: 724 for SV(C|O) and mtDNA

SEQ ID NO: 71509 - DNA, 120 bp, Homo sapiens
  misc_feature: 724 for SV(C|O) and mtDNA
aggaatactagtataccgctcacacctcatatcctccctactatgcctagaaggaataatactatcactgttcattatagctactctcataaccctcaacacccactccctcttagccaa

SEQ ID NO: 71510 - DNA, 120 bp, Homo sapiens
  misc_feature: 724 for SV(C|O) and mtDNA
ttcgtctgtaatattgaacgtaggtgcgataaataataggatgaggcaggaatcaaagacagatactgcgacatagggtgctccggctccagcgtctcgcaatgctatcgcgtgcacacc

SEQ ID NO: 71511 - DNA, 120 bp, Homo sapiens
  misc_feature: 724 for SV(C|O) and mtDNA
acttactgagggctttgaaggctcttggtctgtatttaacctaaatttctataagattattagtataaaaggggagataggtaggagtagcgtggtaagggcgatgagtgtggggaggaa

SEQ ID NO: 71512 - DNA, 120 bp, Homo sapiens; identical to SEQ ID NO: 58050
  misc_feature: 724 for SV(C|O) and mtDNA

SEQ ID NO: 71513 - DNA, 120 bp, Homo sapiens
  misc_feature: 724 for SV(C|O) and mtDNA
ttaagagaaccaacacctctttacagtgaaatgccccaactaaatactaccgtatggcccaccataattacccccatactccttacactattcctcatcacccaactaaaaatattaaac

SEQ ID NO: 71514 - DNA, 120 bp, Homo sapiens
  misc_feature: 724 for SV(C|O) and mtDNA
tgttagacatgggggcatgagttagcagttcttgtgagctttctcggtaaataaggggtcgtaagcctctgttgtcagattcacaatctgatgttttggttaaactatatttacaagagg

SEQ ID NO: 71515 - DNA, 120 bp, Homo sapiens
  misc_feature: 724 for SV(C|O) and mtDNA
ataatgctacagggatgaatattatggagaagtagtctagtttgaagcttagggagagctgggttgtttgggttgtggctcagtgtcagttcgagataataacttcttggtctaggcaca

SEQ ID NO: 71516 - DNA, 120 bp, Homo sapiens
  misc_feature: 724 for SV(C|O) and mtDNA
gaataatgctacagggatgaatattatggagaagtagtctagtttgaagcttagggagagctgggttgtttgggttgtggctcagtgtcagttcgagataataacttcttggtctaggca

SEQ ID NO: 71517 - DNA, 120 bp, Homo sapiens
  misc_feature: 724 for SV(C|O) and mtDNA
aacctggcgcaatagatatagtaccgcaagggaaagatgaaaaattataaccaagcataatacagcaaggactaacccctataccttctgcataatgaattaactagaaataactttgca

SEQ ID NO: 71518 - DNA, 120 bp, Homo sapiens
  misc_feature: 724 for SV(C|O) and mtDNA
cacagaagctgccatcaagtatttcctcacgcaagcaaccgcatccataatccttctaatagctatcctcttcaacaatatactctccggacaatgaaccataaccaatactaccaatca

SEQ ID NO: 71519 - DNA, 120 bp, Homo sapiens
  misc_feature: 724 for SV(C|O) and mtDNA
tgaataatttatgaaggagaggggtcagggttgattcgggaggatcctattggtgcgggggctttgtatgattatgggcgttgattagtagtagttactggttgaacattgtttgttggt

SEQ ID NO: 71520 - DNA, 120 bp, Homo sapiens
  misc_feature: 724 for SV(C|O) and mtDNA
taccctagggataacagcgcaatcctattctagagtccatatcaacaatagggtttacgacctcgatgttggatcaggacatcccgatggtgcagccgctattaaaggttcgtttgttca

SEQ ID NO: 71521 - DNA, 120 bp, Homo sapiens
  misc_feature: 724 for SV(C|O) and mtDNA
caccatttccgacggcatctacggctcaacattttttgtagccacaggcttccacggacttcacgtcattattggctcaactttcctcactatctgcttcatccgccaactaatatttca

SEQ ID NO: 71522 - DNA, 120 bp, Homo sapiens
  misc_feature: 724 for SV(C|O) and mtDNA
taaagactttttctctgatttgtccttggaaaaaggttttcatctccggtttacaagactggtgtattagtttatactacaaggacaggcccatttgagtattttgttttcaattaggga

SEQ ID NO: 71523 - DNA, 120 bp, Homo sapiens
  misc_feature: 724 for SV(C|O) and mtDNA
aatttatgaaggagaggggtcagggttgattcgggaggatcctattggtgcgggggctttgtatgattatgggcgttgattagtagtagttactggttgaacattgtttgttggtgtata

SEQ ID NO: 71524 - DNA, 120 bp, Homo sapiens
  misc_feature: 724 for SV(C|O) and mtDNA
tactctctctacaaggttttttcctagtgtccaaagagctgttcctctttggactaacagttaaatttacaaggggatttagagggttctgtgggcaaatttaaagttgaactaagattc

SEQ ID NO: 71525 - DNA, 120 bp, Homo sapiens
  misc_feature: 724 for SV(C|O) and mtDNA
gttgcctcatcgggtgatgatagccaaggtggggataagtgtggtttcgaagaagatataaaatatgattagttctgtggctgtgaatgttataattaaggagatttgtagggagattag

SEQ ID NO: 71526 - DNA, 120 bp, Homo sapiens
  misc_feature: 724 for SV(C|O) and mtDNA
aaccacaaagacattggaacactatacctattattcggcgcatgagctggagtcctaggcacagctctaagcctccttattcgagccgagctgggccagccaggcaaccttctaggtaac

SEQ ID NO: 71527 - DNA, 120 bp, Homo sapiens; identical to SEQ ID NO: 56411
  misc_feature: 724 for SV(C|O) and mtDNA

SEQ ID NO: 71528 - DNA, 120 bp, Homo sapiens; identical to SEQ ID NO: 54926
  misc_feature: 724 for SV(C|O) and mtDNA

SEQ ID NO: 71529 - DNA, 120 bp, Homo sapiens
  misc_feature: 724 for SV(C|O) and mtDNA
gacatcgtactacacgacacgtactacgttgtagctcacttccactatgtcctatcaataggagctgtatttgccatcataggaggcttcattcactgatttcccctattctcaggctac

SEQ ID NO: 71530 - DNA, 120 bp, Homo sapiens
  misc_feature: 724 for SV(C|O) and mtDNA
ggtgaggggtggctttggagttgcagttgatgtgtgatagttgagggttgattgctgtacttgcttgtaagcatggggagggggttttgatgtggattgggtttttatgtactacaggtg

SEQ ID NO: 71531 - DNA, 120 bp, Homo sapiens; identical to SEQ ID NO: 52651
  misc_feature: 724 for SV(C|O) and mtDNA

SEQ ID NO: 71532 - DNA, 120 bp, Homo sapiens; identical to SEQ ID NO: 55132
  misc_feature: 724 for SV(C|O) and mtDNA

SEQ ID NO: 71533 - DNA, 120 bp, Homo sapiens
  misc_feature: 724 for SV(C|O) and mtDNA
gacaaatcagagaaaaagtctttaactccaccattagcacccaaagctaagattctaatttaaactattctctgttctttcatggggaagcagatttgggtgccacccaagtattgactc

SEQ ID NO: 71534 - DNA, 120 bp, Homo sapiens
  misc_feature: 724 for SV(C|O) and mtDNA
agctgccatcaagtatttcctcacgcaagcaaccgcatccataatccttctaatagctatcctcttcaacaatatactctccggacaatgaaccataaccaatactaccaatcaatactc

SEQ ID NO: 71535 - DNA, 120 bp, Homo sapiens; identical to SEQ ID NO: 54769
  misc_feature: 724 for SV(C|O) and mtDNA

SEQ ID NO: 71536 - DNA, 120 bp, Homo sapiens
  misc_feature: 724 for SV(C|O) and mtDNA
gaccatgtaacgaataatgctacagggatgaatattatggagaagtagtctagtttgaagcttagggagagctgggttgtttgggttgtggctcagtgtcagttcgagataataacttct

SEQ ID NO: 71537 - DNA, 120 bp, Homo sapiens
  misc_feature: 724 for SV(C|O) and mtDNA
gaataatttatgaaggagaggggtcagggttgattcgggaggatcctattggtgcgggggctttgtatgattatgggcgttgattagtagtagttactggttgaacattgtttgttggtg

SEQ ID NO: 71538 - DNA, 120 bp, Homo sapiens
  misc_feature: 724 for SV(C|O) and mtDNA
aagcagatttgggtgccacccaagtattgactcacccatcaacaaccgctatgtaattcgtacattactgccagccaccatgaatattgtacggtaccataaatacttgaccacctgtag

SEQ ID NO: 71539 - DNA, 120 bp, Homo sapiens
  misc_feature: 724 for SV(C|O) and mtDNA
aaggcgaggatgaaaccgatatcgccgatacggttgtataggattgcttgaatggctgctgtgttggcatctgctcgggcgtatcatcaactgatgagcaagaaggatataattcctacg

SEQ ID NO: 71540 - DNA, 120 bp, Homo sapiens
  misc_feature: 724 for SV(C|O) and mtDNA
cctgtacgaaaggacaagagaaataaggcctacttcacaaagcgccttcccccgtaaatgatatcatctcaacttagtattatacccacacccacccaagaacagggtttgttaagatgg

SEQ ID NO: 71541 - DNA, 120 bp, Homo sapiens; identical to SEQ ID NO: 61075
  misc_feature: 724 for SV(C|O) and mtDNA

SEQ ID NO: 71542 - DNA, 120 bp, Homo sapiens
  misc_feature: 724 for SV(C|O) and mtDNA
ccctgtacgaaaggacaagagaaataaggcctacttcacaaagcgccttcccccgtaaatgatatcatctcaacttagtattatacccacacccacccaagaacagggtttgttaagatg

SEQ ID NO: 71543 - DNA, 120 bp, Homo sapiens
  misc_feature: 724 for SV(C|O) and mtDNA
agaatgttttcatgttacttatactaacattagttcttctatagggtgatagattggtccaattgggtgtgaggagttcagttatatgtttgggattttttaggtagtgggtgttgagct

SEQ ID NO: 71544 - DNA, 120 bp, Homo sapiens
  misc_feature: 723 for SV(C|O) and mtDNA
ctaccgtatggcccaccataattacccccatactccttacactattcctcatcacccaactaaaaatattaaacacaaactaccacctacctccctcaccaaagcccataaaaataaaaa

SEQ ID NO: 71545 - DNA, 120 bp, Homo sapiens
  misc_feature: 723 for SV(C|O) and mtDNA
ttctagtcaggttaggtctaggaggagtaggggcaggttttggctcgtaagaaggcctagataggggattgtgcggtgtgtgatggtagggtagaatccgagtatgttggagaaataaaa

SEQ ID NO: 71546 - DNA, 120 bp, Homo sapiens
  misc_feature: 723 for SV(C|O) and mtDNA
tttgggtctgagtttatatatcacagtgagaattctatgatggaccatgtaacgaataatgctacagggatgaatattatggagaagtagtctagtttgaagcttagggagagctgggtt

SEQ ID NO: 71547 - DNA, 120 bp, Homo sapiens
  misc_feature: 723 for SV(C|O) and mtDNA
tttaagctcctattatttactctatcaaagtaactcttttatcagacatatttcttaggtttgagggggaatgctggagattgtaatgggtatggagacatatcatataagtaatgctag

SEQ ID NO: 71548 - DNA, 120 bp, Homo sapiens
  misc_feature: 723 for SV(C|O) and mtDNA
gatcattctatttccccctctattgatccccacctccaaatatctcatcaacaaccgactaatcaccacccaacaatgactaatcaaactaacctcaaaacaaatgataaccatacacaa

SEQ ID NO: 71549 - DNA, 120 bp, Homo sapiens; identical to SEQ ID NO: 57396
  misc_feature: 723 for SV(C|O) and mtDNA

SEQ ID NO: 71550 - DNA, 120 bp, Homo sapiens
  misc_feature: 723 for SV(C|O) and mtDNA
actacttctccataatattcatccctgtagcattattcgttacatggtccatcatagaattctcactgtgatatataaactcagacccaaacattaatcagttcttcaaatatctactca

SEQ ID NO: 71551 - DNA, 120 bp, Homo sapiens
  misc_feature: 723 for SV(C|O) and mtDNA
attttatttctccaacatactcggattctaccctaccatcacacaccgcacaatcccctatctaggccttcttacgagccaaaacctgcccctactcctcctagacctaacctgactaga

SEQ ID NO: 71552 - DNA, 120 bp, Homo sapiens
  misc_feature: 723 for SV(C|O) and mtDNA
taaataaattaaaaaaactattaaacccatataacctcccccaaaattcagaataataacacacccgaccacaccgctaacaatcaatactaaacccccataaataggagaaggcttaga

SEQ ID NO: 71553 - DNA, 120 bp, Homo sapiens
  misc_feature: 723 for SV(C|O) and mtDNA
aacttactgagggctttgaaggctcttggtctgtatttaacctaaatttctataagattattagtataaaaggggagataggtaggagtagcgtggtaagggcgatgagtgtggggagga

SEQ ID NO: 71554 - DNA, 120 bp, Homo sapiens
  misc_feature: 723 for SV(C|O) and mtDNA
tccattgtcgcatccacctttattatcagtctcttccccacaacaatattcatgtgcctagaccaagaagttattatctcgaactgacactgagccacaacccaaacaacccagctctcc

SEQ ID NO: 71555 - DNA, 120 bp, Homo sapiens; identical to SEQ ID NO: 52955
  misc_feature: 723 for SV(C|O) and mtDNA

SEQ ID NO: 71556 - DNA, 120 bp, Homo sapiens
  misc_feature: 723 for SV(C|O) and mtDNA
tattgctaggatgaggatggatagtaatagggcaaggacgcctcctagtttgttagggacggatcggagaattgtgtaggcgaataggaaatatcattcgggcttgatgtggggaggggt

SEQ ID NO: 71557 - DNA, 120 bp, Homo sapiens; identical to SEQ ID NO: 53687
  misc_feature: 723 for SV(C|O) and mtDNA

SEQ ID NO: 71558 - DNA, 120 bp, Homo sapiens
  misc_feature: 723 for SV(C|O) and mtDNA
gagtaaataataggagcttaaacccccttatttctaggactatgagaatcgaacccatccctgagaatccaaaattctccgtgccacctatcacaccccatcctaaagtaaggtcagcta

SEQ ID NO: 71559 - DNA, 120 bp, Homo sapiens
  misc_feature: 723 for SV(C|O) and mtDNA
tagctattaccttcttattatttgatctagaaattgccctccttttacccctaccatgagccctacaaacaactaacctaccactaatagttatgtcatccctcttattaatcatcatcc

SEQ ID NO: 71560 - DNA, 120 bp, Homo sapiens
  misc_feature: 723 for SV(C|O) and mtDNA
tagcccgtaggggcctacaacgttggggcctttgcgtagttgtatatagcctagaatttttcgttcggtaagcattaggaatgccattgcgattagaatgggtacaatgaggagtaggag

SEQ ID NO: 71561 - DNA, 120 bp, Homo sapiens
  misc_feature: 723 for SV(C|O) and mtDNA
ataatttatgaaggagaggggtcagggttgattcgggaggatcctattggtgcgggggctttgtatgattatgggcgttgattagtagtagttactggttgaacattgtttgttggtgta

SEQ ID NO: 71562 - DNA, 120 bp, Homo sapiens
  misc_feature: 723 for SV(C|O) and mtDNA
taataagcagtgcttgaattatttggtttcggttgttttctattagactatggtgagctcaggtgattgatactcctgatgcgagtaatacggatgtgtttaggagtgggacttctaggg

SEQ ID NO: 71563 - DNA, 120 bp, Homo sapiens
  misc_feature: 723 for SV(C|O) and mtDNA
taaataataggagcttaaacccccttatttctaggactatgagaatcgaacccatccctgagaatccaaaattctccgtgccacctatcacaccccatcctaaagtaaggtcagctaaat

SEQ ID NO: 71564 - DNA, 120 bp, Homo sapiens
  misc_feature: 723 for SV(C|O) and mtDNA
taaaatccattgtcgcatccacctttattatcagtctcttccccacaacaatattcatgtgcctagaccaagaagttattatctcgaactgacactgagccacaacccaaacaacccagc

SEQ ID NO: 71565 - DNA, 120 bp, Homo sapiens
  misc_feature: 723 for SV(C|O) and mtDNA
ccctagggataacagcgcaatcctattctagagtccatatcaacaatagggtttacgacctcgatgttggatcaggacatcccgatggtgcagccgctattaaaggttcgtttgttcaac

SEQ ID NO: 71566 - DNA, 120 bp, Homo sapiens
  misc_feature: 723 for SV(C|O) and mtDNA
cacaaagacattggaacactatacctattattcggcgcatgagctggagtcctaggcacagctctaagcctccttattcgagccgagctgggccagccaggcaaccttctaggtaacgac

SEQ ID NO: 71567 - DNA, 120 bp, Homo sapiens
  misc_feature: 723 for SV(C|O) and mtDNA
gggagattagtatagagaggtagagtttttttcgtgatagtggttcactggataagtggcgttggcttgccatgattgtgaggggtaggagtcaggtagttagtattaggaggggggttg

SEQ ID NO: 71568 - DNA, 120 bp, Homo sapiens; identical to SEQ ID NO: 58661
  misc_feature: 723 for SV(C|O) and mtDNA

SEQ ID NO: 71569 - DNA, 120 bp, Homo sapiens
  misc_feature: 723 for SV(C|O) and mtDNA
ggaccatgtaacgaataatgctacagggatgaatattatggagaagtagtctagtttgaagcttagggagagctgggttgtttgggttgtggctcagtgtcagttcgagataataacttc

SEQ ID NO: 71570 - DNA, 120 bp, Homo sapiens
  misc_feature: 723 for SV(C|O) and mtDNA
gcgaaatattatgctttgttgtttggatatatggaggatggggattattgctaggatgaggatggatagtaatagggcaaggacgcctcctagtttgttagggacggatcggagaattgt

SEQ ID NO: 71571 - DNA, 120 bp, Homo sapiens
  misc_feature: 723 for SV(C|O) and mtDNA
gccttaattttaataatcaacaccctcctagccttactactaataattattacattttgactaccacaactcaacggctacatagaaaaatccaccccttacgagtgcggcttcgaccct

SEQ ID NO: 71572 - DNA, 120 bp, Homo sapiens
  misc_feature: 723 for SV(C|O) and mtDNA
gccgtagatgccgtcggaaatggtgaagggagactcgaagtactctgaggcttgtaggagggtaaaatagagacccagtaaaattgtaataagcagtgcttgaattatttggtttcggtt

SEQ ID NO: 71573 - DNA, 120 bp, Homo sapiens
  misc_feature: 723 for SV(C|O) and mtDNA
ccacagaagctgccatcaagtatttcctcacgcaagcaaccgcatccataatccttctaatagctatcctcttcaacaatatactctccggacaatgaaccataaccaatactaccaatc

SEQ ID NO: 71574 - DNA, 120 bp, Homo sapiens
  misc_feature: 723 for SV(C|O) and mtDNA
gattatgggcgttgattagtagtagttactggttgaacattgtttgttggtgtatatattgtaattgagattgctcgggggaataggttatgtgattaggagtagggttaggatgagtgg

SEQ ID NO: 71575 - DNA, 120 bp, Homo sapiens; identical to SEQ ID NO: 55430
  misc_feature: 723 for SV(C|O) and mtDNA

SEQ ID NO: 71576 - DNA, 120 bp, Homo sapiens
  misc_feature: 723 for SV(C|O) and mtDNA
ccgtaggggcctacaacgttggggcctttgcgtagttgtatatagcctagaatttttcgttcggtaagcattaggaatgccattgcgattagaatgggtacaatgaggagtaggaggttg

SEQ ID NO: 71577 - DNA, 120 bp, Homo sapiens; identical to SEQ ID NO: 55037
  misc_feature: 723 for SV(C|O) and mtDNA

SEQ ID NO: 71578 - DNA, 120 bp, Homo sapiens
  misc_feature: 723 for SV(C|O) and mtDNA
aggacgaacctgatctcttatactagtatccttaatcatttttattgccacaactaacctcctcggactcctgcctcactcatttacaccaaccacccaactatctataaacctagccat

SEQ ID NO: 71579 - DNA, 120 bp, Homo sapiens
  misc_feature: 723 for SV(C|O) and mtDNA
aaactagactacttctccataatattcatccctgtagcattattcgttacatggtccatcatagaattctcactgtgatatataaactcagacccaaacattaatcagttcttcaaatat

SEQ ID NO: 71580 - DNA, 120 bp, Homo sapiens
  misc_feature: 723 for SV(C|O) and mtDNA
agatgccgtcggaaatggtgaagggagactcgaagtactctgaggcttgtaggagggtaaaatagagacccagtaaaattgtaataagcagtgcttgaattatttggtttcggttgtttt

SEQ ID NO: 71581 - DNA, 120 bp, Homo sapiens
  misc_feature: 723 for SV(C|O) and mtDNA
aagagtcagaagcttatgttgtttatgcggggaaacgccatatcgggggcaccgattattaggggaactagtcagttgccaaagcctccgattatgatgggtattactatgaagaagatt

SEQ ID NO: 71582 - DNA, 120 bp, Homo sapiens; identical to SEQ ID NO: 54244
  misc_feature: 723 for SV(C|O) and mtDNA

SEQ ID NO: 71583 - DNA, 120 bp, Homo sapiens
  misc_feature: 722 for SV(C|O) and mtDNA
tactaccgtatggcccaccataattacccccatactccttacactattcctcatcacccaactaaaaatattaaacacaaactaccacctacctccctcaccaaagcccataaaaataaa

SEQ ID NO: 71584 - DNA, 120 bp, Homo sapiens
  misc_feature: 722 for SV(C|O) and mtDNA
tcggattctaccctaccatcacacaccgcacaatcccctatctaggccttcttacgagccaaaacctgcccctactcctcctagacctaacctgactagaaaagctattacctaaaacaa

SEQ ID NO: 71585 - DNA, 120 bp, Homo sapiens
  misc_feature: 722 for SV(C|O) and mtDNA
attatgtaaaatccattgtcgcatccacctttattatcagtctcttccccacaacaatattcatgtgcctagaccaagaagttattatctcgaactgacactgagccacaacccaaacaa

SEQ ID NO: 71586 - DNA, 120 bp, Homo sapiens
  misc_feature: 722 for SV(C|O) and mtDNA
ttgttggtatcctagtgggtgaggggtggctttggagttgcagttgatgtgtgatagttgagggttgattgctgtacttgcttgtaagcatggggagggggttttgatgtggattgggtt

SEQ ID NO: 71587 - DNA, 120 bp, Homo sapiens
  misc_feature: 722 for SV(C|O) and mtDNA
atggcccaccataattacccccatactccttacactattcctcatcacccaactaaaaatattaaacacaaactaccacctacctccctcaccaaagcccataaaaataaaaaattataa

SEQ ID NO: 71588 - DNA, 120 bp, Homo sapiens
  misc_feature: 722 for SV(C|O) and mtDNA
aaaccacaaagacattggaacactatacctattattcggcgcatgagctggagtcctaggcacagctctaagcctccttattcgagccgagctgggccagccaggcaaccttctaggtaa

SEQ ID NO: 71589 - DNA, 120 bp, Homo sapiens
  misc_feature: 722 for SV(C|O) and mtDNA
tgatcattctatttccccctctattgatccccacctccaaatatctcatcaacaaccgactaatcaccacccaacaatgactaatcaaactaacctcaaaacaaatgataaccatacaca

SEQ ID NO: 71590 - DNA, 120 bp, Homo sapiens
  misc_feature: 722 for SV(C|O) and mtDNA
tgcgaagaaaaaaacttctgaggtaataaataggattatcccgtatcgaaggcctttttggacaggtggtgtgtggtggccttggtatgtgctttctcgtgttacatcgcgccatcattg

SEQ ID NO: 71591 - DNA, 120 bp, Homo sapiens
  misc_feature: 722 for SV(C|O) and mtDNA
tcgtaaggggtggatttttctatgtagccgttgagttgtggtagtcaaaatgtaataattattagtagtaaggctaggagggtgttgattattaaaattaaggcgaagtttattactctt

SEQ ID NO: 71592 - DNA, 120 bp, Homo sapiens
  misc_feature: 722 for SV(C|O) and mtDNA
gcctttttggacaggtggtgtgtggtggccttggtatgtgctttctcgtgttacatcgcgccatcattggtatatggttagtgtgttggttagtaggcctagtatgaggagcgttatgga

SEQ ID NO: 71593 - DNA, 120 bp, Homo sapiens
  misc_feature: 722 for SV(C|O) and mtDNA
gtatgattatgggcgttgattagtagtagttactggttgaacattgtttgttggtgtatatattgtaattgagattgctcgggggaataggttatgtgattaggagtagggttaggatga

SEQ ID NO: 71594 - DNA, 120 bp, Homo sapiens
  misc_feature: 722 for SV(C|O) and mtDNA
tcatcactagacatcgtactacacgacacgtactacgttgtagctcacttccactatgtcctatcaataggagctgtatttgccatcataggaggcttcattcactgatttcccctattc

SEQ ID NO: 71595 - DNA, 120 bp, Homo sapiens
  misc_feature: 722 for SV(C|O) and mtDNA
tatgtctgataaaagagttactttgatagagtaaataataggagcttaaacccccttatttctaggactatgagaatcgaacccatccctgagaatccaaaattctccgtgccacctatc

SEQ ID NO: 71596 - DNA, 120 bp, Homo sapiens
  misc_feature: 722 for SV(C|O) and mtDNA
tatgagagtagctataatgaacagtgatagtattattccttctaggcatagtagggaggatatgaggtgtgagcggtatactagtattcctagaagtgagatggtaaatgctagtataat

SEQ ID NO: 71597 - DNA, 120 bp, Homo sapiens; identical to SEQ ID NO: 53129
  misc_feature: 722 for SV(C|O) and mtDNA

SEQ ID NO: 71598 - DNA, 120 bp, Homo sapiens
  misc_feature: 722 for SV(C|O) and mtDNA
taatttatgaaggagaggggtcagggttgattcgggaggatcctattggtgcgggggctttgtatgattatgggcgttgattagtagtagttactggttgaacattgtttgttggtgtat

SEQ ID NO: 71599 - DNA, 120 bp, Homo sapiens
  misc_feature: 722 for SV(C|O) and mtDNA
cattattcgttacatggtccatcatagaattctcactgtgatatataaactcagacccaaacattaatcagttcttcaaatatctactcatcttcctaattaccatactaatcttagtta

SEQ ID NO: 71600 - DNA, 120 bp, Homo sapiens
  misc_feature: 722 for SV(C|O) and mtDNA
atgtgttttgtcagggggttgagaatgagtgtgaggcgtattataccatagccgcctagttttaagagtactgcggcaagtactattgacccagcgatgggggcttcgacatgggcttta

SEQ ID NO: 71601 - DNA, 120 bp, Homo sapiens
  misc_feature: 722 for SV(C|O) and mtDNA
ccctctattgatccccacctccaaatatctcatcaacaaccgactaatcaccacccaacaatgactaatcaaactaacctcaaaacaaatgataaccatacacaacactaaaggacgaac

SEQ ID NO: 71602 - DNA, 120 bp, Homo sapiens
  misc_feature: 722 for SV(C|O) and mtDNA
actatgcacattttatttctccaacatactcggattctaccctaccatcacacaccgcacaatcccctatctaggccttcttacgagccaaaacctgcccctactcctcctagacctaac

SEQ ID NO: 71603 - DNA, 120 bp, Homo sapiens
  misc_feature: 722 for SV(C|O) and mtDNA
gtgggtgaggggtggctttggagttgcagttgatgtgtgatagttgagggttgattgctgtacttgcttgtaagcatggggagggggttttgatgtggattgggtttttatgtactacag

SEQ ID NO: 71604 - DNA, 120 bp, Homo sapiens
  misc_feature: 722 for SV(C|O) and mtDNA
ccttagccaaaccatttacccaaataaagtataggcgatagaaattgaaacctggcgcaatagatatagtaccgcaagggaaagatgaaaaattataaccaagcataatacagcaaggac

SEQ ID NO: 71605 - DNA, 120 bp, Homo sapiens
  misc_feature: 722 for SV(C|O) and mtDNA
gaagctgccatcaagtatttcctcacgcaagcaaccgcatccataatccttctaatagctatcctcttcaacaatatactctccggacaatgaaccataaccaatactaccaatcaatac

SEQ ID NO: 71606 - DNA, 120 bp, Homo sapiens
  misc_feature: 722 for SV(C|O) and mtDNA
acatgggggcatgagttagcagttcttgtgagctttctcggtaaataaggggtcgtaagcctctgttgtcagattcacaatctgatgttttggttaaactatatttacaagaggaaaacc

SEQ ID NO: 71607 - DNA, 120 bp, Homo sapiens
  misc_feature: 722 for SV(C|O) and mtDNA
ggcccccaacaggcatcaccccgctaaatcccctagaagtcccactcctaaacacatccgtattactcgcatcaggagtatcaatcacctgagctcaccatagtctaatagaaaacaacc

SEQ ID NO: 71608 - DNA, 120 bp, Homo sapiens
  misc_feature: 722 for SV(C|O) and mtDNA
ataaaccctcgttccacagaagctgccatcaagtatttcctcacgcaagcaaccgcatccataatccttctaatagctatcctcttcaacaatatactctccggacaatgaaccataacc

SEQ ID NO: 71609 - DNA, 120 bp, Homo sapiens
  misc_feature: 722 for SV(C|O) and mtDNA
ctatgcacattttatttctccaacatactcggattctaccctaccatcacacaccgcacaatcccctatctaggccttcttacgagccaaaacctgcccctactcctcctagacctaacc

SEQ ID NO: 71610 - DNA, 120 bp, Homo sapiens
  misc_feature: 722 for SV(C|O) and mtDNA
actactactaatcaacgcccataatcatacaaagcccccgcaccaataggatcctcccgaatcaaccctgacccctctccttcataaattattcagcttcctacactattaaagtttacc

SEQ ID NO: 71611 - DNA, 120 bp, Homo sapiens; identical to SEQ ID NO: 58563
  misc_feature: 722 for SV(C|O) and mtDNA

SEQ ID NO: 71612 - DNA, 120 bp, Homo sapiens
  misc_feature: 722 for SV(C|O) and mtDNA
ggggcatccatatagtcactccaggtttatggagggttcttctactattaggacttttcgcttcgaagcgaaggcttctcaaatcatgaaaattattaatattactgctgttagagaaat

SEQ ID NO: 71613 - DNA, 120 bp, Homo sapiens
  misc_feature: 722 for SV(C|O) and mtDNA
ctaggaatactagtataccgctcacacctcatatcctccctactatgcctagaaggaataatactatcactgttcattatagctactctcataaccctcaacacccactccctcttagcc

SEQ ID NO: 71614 - DNA, 120 bp, Homo sapiens; identical to SEQ ID NO: 57872
  misc_feature: 722 for SV(C|O) and mtDNA

SEQ ID NO: 71615 - DNA, 120 bp, Homo sapiens
  misc_feature: 722 for SV(C|O) and mtDNA
ggattctaccctaccatcacacaccgcacaatcccctatctaggccttcttacgagccaaaacctgcccctactcctcctagacctaacctgactagaaaagctattacctaaaacaatt

SEQ ID NO: 71616 - DNA, 120 bp, Homo sapiens; identical to SEQ ID NO: 56921
  misc_feature: 722 for SV(C|O) and mtDNA

SEQ ID NO: 71617 - DNA, 120 bp, Homo sapiens
  misc_feature: 722 for SV(C|O) and mtDNA
actagttattatcgaaaccatcagcctactcattcaaccaatagccctggccgtacgcctaaccgctaacattactgcaggccacctactcatgcacctaattggaagcgccaccctagc

SEQ ID NO: 71618 - DNA, 120 bp, Homo sapiens
  misc_feature: 722 for SV(C|O) and mtDNA
atccctagggtaacttgttccgttggtcaagttattggatcaattgagtatagtagttcgctttgactggtgaagtcttagcatgtactgctcggaggttgggttctgctccgaggtcgc

SEQ ID NO: 71619 - DNA, 120 bp, Homo sapiens
  misc_feature: 722 for SV(C|O) and mtDNA
gatgccgtcggaaatggtgaagggagactcgaagtactctgaggcttgtaggagggtaaaatagagacccagtaaaattgtaataagcagtgcttgaattatttggtttcggttgttttc

SEQ ID NO: 71620 - DNA, 120 bp, Homo sapiens
  misc_feature: 722 for SV(C|O) and mtDNA
ctctctacaaggttttttcctagtgtccaaagagctgttcctctttggactaacagttaaatttacaaggggatttagagggttctgtgggcaaatttaaagttgaactaagattctatc

SEQ ID NO: 71621 - DNA, 120 bp, Homo sapiens
  misc_feature: 722 for SV(C|O) and mtDNA
aataggatgaggcaggaatcaaagacagatactgcgacatagggtgctccggctccagcgtctcgcaatgctatcgcgtgcacaccccccagacgaaaataccaaatgcatggagagctc

SEQ ID NO: 71622 - DNA, 120 bp, Homo sapiens; identical to SEQ ID NO: 53638
  misc_feature: 722 for SV(C|O) and mtDNA

SEQ ID NO: 71623 - DNA, 120 bp, Homo sapiens
  misc_feature: 722 for SV(C|O) and mtDNA
ctgccatcaagtatttcctcacgcaagcaaccgcatccataatccttctaatagctatcctcttcaacaatatactctccggacaatgaaccataaccaatactaccaatcaatactcat

SEQ ID NO: 71624 - DNA, 120 bp, Homo sapiens
  misc_feature: 722 for SV(C|O) and mtDNA
aaagactttttctctgatttgtccttggaaaaaggttttcatctccggtttacaagactggtgtattagtttatactacaaggacaggcccatttgagtattttgttttcaattagggag

SEQ ID NO: 71625 - DNA, 120 bp, Homo sapiens
  misc_feature: 722 for SV(C|O) and mtDNA
ccaattaggagggcactggcccccaacaggcatcaccccgctaaatcccctagaagtcccactcctaaacacatccgtattactcgcatcaggagtatcaatcacctgagctcaccatag

SEQ ID NO: 71626 - DNA, 120 bp, Homo sapiens
  misc_feature: 722 for SV(C|O) and mtDNA
cggattctaccctaccatcacacaccgcacaatcccctatctaggccttcttacgagccaaaacctgcccctactcctcctagacctaacctgactagaaaagctattacctaaaacaat

SEQ ID NO: 71627 - DNA, 120 bp, Homo sapiens
  misc_feature: 722 for SV(C|O) and mtDNA
agaattctatgatggaccatgtaacgaataatgctacagggatgaatattatggagaagtagtctagtttgaagcttagggagagctgggttgtttgggttgtggctcagtgtcagttcg

SEQ ID NO: 71628 - DNA, 120 bp, Homo sapiens
  misc_feature: 722 for SV(C|O) and mtDNA
agcccgtaggggcctacaacgttggggcctttgcgtagttgtatatagcctagaatttttcgttcggtaagcattaggaatgccattgcgattagaatgggtacaatgaggagtaggagg

SEQ ID NO: 71629 - DNA, 120 bp, Homo sapiens; identical to SEQ ID NO: 57987
  misc_feature: 722 for SV(C|O) and mtDNA

SEQ ID NO: 71630 - DNA, 120 bp, Homo sapiens
  misc_feature: 722 for SV(C|O) and mtDNA
catccaacatctccgcatgatgaaacttcggctcactccttggcgcctgcctgatcctccaaatcaccacaggactattcctagccatgcactactcaccagacgcctcaaccgcctttt

SEQ ID NO: 71631 - DNA, 120 bp, Homo sapiens
  misc_feature: 722 for SV(C|O) and mtDNA
aaatactaccgtatggcccaccataattacccccatactccttacactattcctcatcacccaactaaaaatattaaacacaaactaccacctacctccctcaccaaagcccataaaaat

SEQ ID NO: 71632 - DNA, 120 bp, Homo sapiens; identical to SEQ ID NO: 52949
  misc_feature: 722 for SV(C|O) and mtDNA

SEQ ID NO: 71633 - DNA, 120 bp, Homo sapiens; identical to SEQ ID NO: 61710
  misc_feature: 722 for SV(C|O) and mtDNA

SEQ ID NO: 71634 - DNA, 120 bp, Homo sapiens
  misc_feature: 722 for SV(C|O) and mtDNA
aagctgccatcaagtatttcctcacgcaagcaaccgcatccataatccttctaatagctatcctcttcaacaatatactctccggacaatgaaccataaccaatactaccaatcaatact

SEQ ID NO: 71635 - DNA, 120 bp, Homo sapiens
  misc_feature: 722 for SV(C|O) and mtDNA
agggataacagcgcaatcctattctagagtccatatcaacaatagggtttacgacctcgatgttggatcaggacatcccgatggtgcagccgctattaaaggttcgtttgttcaacgatt

SEQ ID NO: 71636 - DNA, 120 bp, Homo sapiens
  misc_feature: 722 for SV(C|O) and mtDNA
aaaatccattgtcgcatccacctttattatcagtctcttccccacaacaatattcatgtgcctagaccaagaagttattatctcgaactgacactgagccacaacccaaacaacccagct

SEQ ID NO: 71637 - DNA, 120 bp, Homo sapiens; identical to SEQ ID NO: 53740
  misc_feature: 721 for SV(C|O) and mtDNA

SEQ ID NO: 71638 - DNA, 120 bp, Homo sapiens
  misc_feature: 721 for SV(C|O) and mtDNA
ccccactaaaacactcaccaagacctcaacccctgacccccatgcctcaggatactcctcaatagccatcgctgtagtatatccaaagacaaccatcattccccctaaataaattaaaaa

SEQ ID NO: 71639 - DNA, 120 bp, Homo sapiens
  misc_feature: 721 for SV(C|O) and mtDNA
agacatgggggcatgagttagcagttcttgtgagctttctcggtaaataaggggtcgtaagcctctgttgtcagattcacaatctgatgttttggttaaactatatttacaagaggaaaa

SEQ ID NO: 71640 - DNA, 120 bp, Homo sapiens
  misc_feature: 721 for SV(C|O) and mtDNA
actaccgtatggcccaccataattacccccatactccttacactattcctcatcacccaactaaaaatattaaacacaaactaccacctacctccctcaccaaagcccataaaaataaaa

SEQ ID NO: 71641 - DNA, 120 bp, Homo sapiens; identical to SEQ ID NO: 57533
  misc_feature: 721 for SV(C|O) and mtDNA

SEQ ID NO: 71642 - DNA, 120 bp, Homo sapiens; identical to SEQ ID NO: 53798
  misc_feature: 721 for SV(C|O) and mtDNA

SEQ ID NO: 71643 - DNA, 120 bp, Homo sapiens; identical to SEQ ID NO: 52213
  misc_feature: 721 for SV(C|O) and mtDNA

SEQ ID NO: 71644 - DNA, 120 bp, Homo sapiens
  misc_feature: 721 for SV(C|O) and mtDNA
acagaagctgccatcaagtatttcctcacgcaagcaaccgcatccataatccttctaatagctatcctcttcaacaatatactctccggacaatgaaccataaccaatactaccaatcaa

SEQ ID NO: 71645 - DNA, 120 bp, Homo sapiens
  misc_feature: 721 for SV(C|O) and mtDNA
ttctaggaatactagtataccgctcacacctcatatcctccctactatgcctagaaggaataatactatcactgttcattatagctactctcataaccctcaacacccactccctcttag

SEQ ID NO: 71646 - DNA, 120 bp, Homo sapiens
  misc_feature: 721 for SV(C|O) and mtDNA
tggatatactacagcgatggctattgaggagtatcctgaggcatgggggtcaggggttgaggtcttggtgagtgttttagtggggttagcgatggaggtaggattggtgctgtgggtgaa

SEQ ID NO: 71647 - DNA, 120 bp, Homo sapiens
  misc_feature: 721 for SV(C|O) and mtDNA
ttagaatcttagctttgggtgctaatggtggagttaaagactttttctctgatttgtccttggaaaaaggttttcatctccggtttacaagactggtgtattagtttatactacaaggac

SEQ ID NO: 71648 - DNA, 120 bp, Homo sapiens
  misc_feature: 721 for SV(C|O) and mtDNA
tcattctatttccccctctattgatccccacctccaaatatctcatcaacaaccgactaatcaccacccaacaatgactaatcaaactaacctcaaaacaaatgataaccatacacaaca

SEQ ID NO: 71649 - DNA, 120 bp, Homo sapiens
  misc_feature: 721 for SV(C|O) and mtDNA
aggccccaaaaattttggtgcaactccaaataaaagtaacaaccatgcacactactataaccaccctaaccctgacttccctaattccccccatccttaccaccctcgttaaccctaaca

SEQ ID NO: 71650 - DNA, 120 bp, Homo sapiens; identical to SEQ ID NO: 57800
  misc_feature: 721 for SV(C|O) and mtDNA

SEQ ID NO: 71651 - DNA, 120 bp, Homo sapiens
  misc_feature: 721 for SV(C|O) and mtDNA
taaaccctcgttccacagaagctgccatcaagtatttcctcacgcaagcaaccgcatccataatccttctaatagctatcctcttcaacaatatactctccggacaatgaaccataacca

SEQ ID NO: 71652 - DNA, 120 bp, Homo sapiens; identical to SEQ ID NO: 59485
  misc_feature: 721 for SV(C|O) and mtDNA

SEQ ID NO: 71653 - DNA, 120 bp, Homo sapiens; identical to SEQ ID NO: 52077
  misc_feature: 721 for SV(C|O) and mtDNA

SEQ ID NO: 71654 - DNA, 120 bp, Homo sapiens
  misc_feature: 721 for SV(C|O) and mtDNA
accttagccaaaccatttacccaaataaagtataggcgatagaaattgaaacctggcgcaatagatatagtaccgcaagggaaagatgaaaaattataaccaagcataatacagcaagga

SEQ ID NO: 71655 - DNA, 120 bp, Homo sapiens
  misc_feature: 721 for SV(C|O) and mtDNA
acattttatttctccaacatactcggattctaccctaccatcacacaccgcacaatcccctatctaggccttcttacgagccaaaacctgcccctactcctcctagacctaacctgacta

SEQ ID NO: 71656 - DNA, 120 bp, Homo sapiens
  misc_feature: 721 for SV(C|O) and mtDNA
acatactcggattctaccctaccatcacacaccgcacaatcccctatctaggccttcttacgagccaaaacctgcccctactcctcctagacctaacctgactagaaaagctattaccta

SEQ ID NO: 71657 - DNA, 120 bp, Homo sapiens
  misc_feature: 721 for SV(C|O) and mtDNA
ataggagcttaaacccccttatttctaggactatgagaatcgaacccatccctgagaatccaaaattctccgtgccacctatcacaccccatcctaaagtaaggtcagctaaataagcta

SEQ ID NO: 71658 - DNA, 120 bp, Homo sapiens
  misc_feature: 721 for SV(C|O) and mtDNA
agattaagagaaccaacacctctttacagtgaaatgccccaactaaatactaccgtatggcccaccataattacccccatactccttacactattcctcatcacccaactaaaaatatta

SEQ ID NO: 71659 - DNA, 120 bp, Homo sapiens
  misc_feature: 721 for SV(C|O) and mtDNA
accaaccacccaactatctataaacctagccatggccatccccttatgagcgggcgcagtgattataggctttcgctctaagattaaaaatgccctagcccacttcttaccacaaggcac

SEQ ID NO: 71660 - DNA, 120 bp, Homo sapiens
  misc_feature: 721 for SV(C|O) and mtDNA
gcacattttatttctccaacatactcggattctaccctaccatcacacaccgcacaatcccctatctaggccttcttacgagccaaaacctgcccctactcctcctagacctaacctgac

SEQ ID NO: 71661 - DNA, 120 bp, Homo sapiens; identical to SEQ ID NO: 52699
  misc_feature: 721 for SV(C|O) and mtDNA

SEQ ID NO: 71662 - DNA, 120 bp, Homo sapiens
  misc_feature: 721 for SV(C|O) and mtDNA
catgggggcatgagttagcagttcttgtgagctttctcggtaaataaggggtcgtaagcctctgttgtcagattcacaatctgatgttttggttaaactatatttacaagaggaaaaccc

SEQ ID NO: 71663 - DNA, 120 bp, Homo sapiens
  misc_feature: 721 for SV(C|O) and mtDNA
agagagtaaaaaatttaacacccatagtaggcctaaaagcagccaccaattaagaaagcgttcaagctcaacacccactacctaaaaaatcccaaacatataactgaactcctcacaccc

SEQ ID NO: 71664 - DNA, 120 bp, Homo sapiens
  misc_feature: 721 for SV(C|O) and mtDNA
cgccttaattttaataatcaacaccctcctagccttactactaataattattacattttgactaccacaactcaacggctacatagaaaaatccaccccttacgagtgcggcttcgaccc

SEQ ID NO: 71665 - DNA, 120 bp, Homo sapiens; identical to SEQ ID NO: 58421
  misc_feature: 721 for SV(C|O) and mtDNA

SEQ ID NO: 71666 - DNA, 120 bp, Homo sapiens
  misc_feature: 721 for SV(C|O) and mtDNA
ggcctttttggacaggtggtgtgtggtggccttggtatgtgctttctcgtgttacatcgcgccatcattggtatatggttagtgtgttggttagtaggcctagtatgaggagcgttatgg

SEQ ID NO: 71667 - DNA, 120 bp, Homo sapiens; identical to SEQ ID NO: 52075
  misc_feature: 721 for SV(C|O) and mtDNA

SEQ ID NO: 71668 - DNA, 120 bp, Homo sapiens
  misc_feature: 721 for SV(C|O) and mtDNA
ggacaaatcagagaaaaagtctttaactccaccattagcacccaaagctaagattctaatttaaactattctctgttctttcatggggaagcagatttgggtgccacccaagtattgact

SEQ ID NO: 71669 - DNA, 120 bp, Homo sapiens; identical to SEQ ID NO: 59267
  misc_feature: 721 for SV(C|O) and mtDNA

SEQ ID NO: 71670 - DNA, 120 bp, Homo sapiens; identical to SEQ ID NO: 53268
  misc_feature: 721 for SV(C|O) and mtDNA

SEQ ID NO: 71671 - DNA, 120 bp, Homo sapiens
  misc_feature: 721 for SV(C|O) and mtDNA
ctcgtaaggggtggatttttctatgtagccgttgagttgtggtagtcaaaatgtaataattattagtagtaaggctaggagggtgttgattattaaaattaaggcgaagtttattactct

SEQ ID NO: 71672 - DNA, 120 bp, Homo sapiens
  misc_feature: 721 for SV(C|O) and mtDNA
atcgaaggcctttttggacaggtggtgtgtggtggccttggtatgtgctttctcgtgttacatcgcgccatcattggtatatggttagtgtgttggttagtaggcctagtatgaggagcg

SEQ ID NO: 71673 - DNA, 120 bp, Homo sapiens; identical to SEQ ID NO: 58037
  misc_feature: 721 for SV(C|O) and mtDNA

SEQ ID NO: 71674 - DNA, 120 bp, Homo sapiens
  misc_feature: 721 for SV(C|O) and mtDNA
cctagtgggtgaggggtggctttggagttgcagttgatgtgtgatagttgagggttgattgctgtacttgcttgtaagcatggggagggggttttgatgtggattgggtttttatgtact

SEQ ID NO: 71675 - DNA, 120 bp, Homo sapiens
  misc_feature: 721 for SV(C|O) and mtDNA
catttccgacggcatctacggctcaacattttttgtagccacaggcttccacggacttcacgtcattattggctcaactttcctcactatctgcttcatccgccaactaatatttcactt

SEQ ID NO: 71676 - DNA, 120 bp, Homo sapiens
  misc_feature: 721 for SV(C|O) and mtDNA
agactacttctccataatattcatccctgtagcattattcgttacatggtccatcatagaattctcactgtgatatataaactcagacccaaacattaatcagttcttcaaatatctact

SEQ ID NO: 71677 - DNA, 120 bp, Homo sapiens
  misc_feature: 721 for SV(C|O) and mtDNA
acctacaccccttatccccatactagttattatcgaaaccatcagcctactcattcaaccaatagccctggccgtacgcctaaccgctaacattactgcaggccacctactcatgcacct

SEQ ID NO: 71678 - DNA, 120 bp, Homo sapiens; identical to SEQ ID NO: 57190
  misc_feature: 721 for SV(C|O) and mtDNA

SEQ ID NO: 71679 - DNA, 120 bp, Homo sapiens
  misc_feature: 721 for SV(C|O) and mtDNA
aataatttatgaaggagaggggtcagggttgattcgggaggatcctattggtgcgggggctttgtatgattatgggcgttgattagtagtagttactggttgaacattgtttgttggtgt

SEQ ID NO: 71680 - DNA, 120 bp, Homo sapiens; identical to SEQ ID NO: 52269
  misc_feature: 720 for SV(C|O) and mtDNA

SEQ ID NO: 71681 - DNA, 120 bp, Homo sapiens
  misc_feature: 720 for SV(C|O) and mtDNA
tttaggtctgtttgtcgtaggcagatggagcttgttataattatgcctcatagggatagtacaaggaaggggtaggctatgtgttttgtcagggggttgagaatgagtgtgaggcgtatt

SEQ ID NO: 71682 - DNA, 120 bp, Homo sapiens
  misc_feature: 720 for SV(C|O) and mtDNA
agaagcttatgttgtttatgcggggaaacgccatatcgggggcaccgattattaggggaactagtcagttgccaaagcctccgattatgatgggtattactatgaagaagattattacaa

SEQ ID NO: 71683 - DNA, 120 bp, Homo sapiens
  misc_feature: 720 for SV(C|O) and mtDNA
ttgtaaaaaactccagctgacacaaaatagactacgaaagtggctttaacatatctgaacacacaatagctaagacccaaactgggattagataccccactatgcttagccctaaacctc

SEQ ID NO: 71684 - DNA, 120 bp, Homo sapiens; identical to SEQ ID NO: 58647
  misc_feature: 720 for SV(C|O) and mtDNA

SEQ ID NO: 71685 - DNA, 120 bp, Homo sapiens
  misc_feature: 720 for SV(C|O) and mtDNA
ctgagttgtaaaaaactccagctgacacaaaatagactacgaaagtggctttaacatatctgaacacacaatagctaagacccaaactgggattagataccccactatgcttagccctaa

SEQ ID NO: 71686 - DNA, 120 bp, Homo sapiens
  misc_feature: 720 for SV(C|O) and mtDNA
tgtaaaaaactccagctgacacaaaatagactacgaaagtggctttaacatatctgaacacacaatagctaagacccaaactgggattagataccccactatgcttagccctaaacctca

SEQ ID NO: 71687 - DNA, 120 bp, Homo sapiens
  misc_feature: 720 for SV(C|O) and mtDNA
ctactactaatcaacgcccataatcatacaaagcccccgcaccaataggatcctcccgaatcaaccctgacccctctccttcataaattattcagcttcctacactattaaagtttacca

SEQ ID NO: 71688 - DNA, 120 bp, Homo sapiens; identical to SEQ ID NO: 56789
  misc_feature: 720 for SV(C|O) and mtDNA

SEQ ID NO: 71689 - DNA, 120 bp, Homo sapiens; identical to SEQ ID NO: 56792
  misc_feature: 720 for SV(C|O) and mtDNA

SEQ ID NO: 71690 - DNA, 120 bp, Homo sapiens
  misc_feature: 720 for SV(C|O) and mtDNA
tgccatcaagtatttcctcacgcaagcaaccgcatccataatccttctaatagctatcctcttcaacaatatactctccggacaatgaaccataaccaatactaccaatcaatactcatc

SEQ ID NO: 71691 - DNA, 120 bp, Homo sapiens
  misc_feature: 720 for SV(C|O) and mtDNA
tcactagacatcgtactacacgacacgtactacgttgtagctcacttccactatgtcctatcaataggagctgtatttgccatcataggaggcttcattcactgatttcccctattctca

SEQ ID NO: 71692 - DNA, 120 bp, Homo sapiens
  misc_feature: 720 for SV(C|O) and mtDNA
tctcctatttatgggggtttagtattgattgttagcggtgtggtcgggtgtgttattattctgaattttgggggaggttatatgggtttaatagtttttttaatttatttagggggaatg

SEQ ID NO: 71693 - DNA, 120 bp, Homo sapiens
  misc_feature: 720 for SV(C|O) and mtDNA
attagaatcttagctttgggtgctaatggtggagttaaagactttttctctgatttgtccttggaaaaaggttttcatctccggtttacaagactggtgtattagtttatactacaagga

SEQ ID NO: 71694 - DNA, 120 bp, Homo sapiens
  misc_feature: 720 for SV(C|O) and mtDNA
tccacagaagctgccatcaagtatttcctcacgcaagcaaccgcatccataatccttctaatagctatcctcttcaacaatatactctccggacaatgaaccataaccaatactaccaat

SEQ ID NO: 71695 - DNA, 120 bp, Homo sapiens; identical to SEQ ID NO: 57836
  misc_feature: 720 for SV(C|O) and mtDNA

SEQ ID NO: 71696 - DNA, 120 bp, Homo sapiens
  misc_feature: 720 for SV(C|O) and mtDNA
tattaccttcttattatttgatctagaaattgccctccttttacccctaccatgagccctacaaacaactaacctaccactaatagttatgtcatccctcttattaatcatcatcctagc

SEQ ID NO: 71697 - DNA, 120 bp, Homo sapiens
  misc_feature: 720 for SV(C|O) and mtDNA
agaaaaaaacttctgaggtaataaataggattatcccgtatcgaaggcctttttggacaggtggtgtgtggtggccttggtatgtgctttctcgtgttacatcgcgccatcattggtata

SEQ ID NO: 71698 - DNA, 120 bp, Homo sapiens
  misc_feature: 720 for SV(C|O) and mtDNA
tagtttaaacaaaacgaatgatttcgactcattaaattatgataatcatatttaccaaatgcccctcatttacataaatattatactagcatttaccatctcacttctaggaatactagt

SEQ ID NO: 71699 - DNA, 120 bp, Homo sapiens
  misc_feature: 720 for SV(C|O) and mtDNA
tagtgggtgaggggtggctttggagttgcagttgatgtgtgatagttgagggttgattgctgtacttgcttgtaagcatggggagggggttttgatgtggattgggtttttatgtactac

SEQ ID NO: 71700 - DNA, 120 bp, Homo sapiens
  misc_feature: 720 for SV(C|O) and mtDNA
ctagtgggtgaggggtggctttggagttgcagttgatgtgtgatagttgagggttgattgctgtacttgcttgtaagcatggggagggggttttgatgtggattgggtttttatgtacta

SEQ ID NO: 71701 - DNA, 120 bp, Homo sapiens
  misc_feature: 720 for SV(C|O) and mtDNA
taggccatatgtgttggagattgagactagtagggctaggcccaccgctgcttcgcaggcggcaaagactagtatggcaataggcacaatattggctaagagggagtgggtgttgagggt

SEQ ID NO: 71702 - DNA, 120 bp, Homo sapiens
  misc_feature: 720 for SV(C|O) and mtDNA
tagctataatgaacagtgatagtattattccttctaggcatagtagggaggatatgaggtgtgagcggtatactagtattcctagaagtgagatggtaaatgctagtataatatttatgt

SEQ ID NO: 71703 - DNA, 120 bp, Homo sapiens
  misc_feature: 720 for SV(C|O) and mtDNA
gtttaagctcctattatttactctatcaaagtaactcttttatcagacatatttcttaggtttgagggggaatgctggagattgtaatgggtatggagacatatcatataagtaatgcta

SEQ ID NO: 71704 - DNA, 120 bp, Homo sapiens
  misc_feature: 720 for SV(C|O) and mtDNA
agtttaaacaaaacgaatgatttcgactcattaaattatgataatcatatttaccaaatgcccctcatttacataaatattatactagcatttaccatctcacttctaggaatactagta

SEQ ID NO: 71705 - DNA, 120 bp, Homo sapiens; identical to SEQ ID NO: 55027
  misc_feature: 720 for SV(C|O) and mtDNA

SEQ ID NO: 71706 - DNA, 120 bp, Homo sapiens; identical to SEQ ID NO: 54500
  misc_feature: 720 for SV(C|O) and mtDNA

SEQ ID NO: 71707 - DNA, 120 bp, Homo sapiens
  misc_feature: 720 for SV(C|O) and mtDNA
gtttaaacaaaacgaatgatttcgactcattaaattatgataatcatatttaccaaatgcccctcatttacataaatattatactagcatttaccatctcacttctaggaatactagtat

SEQ ID NO: 71708 - DNA, 120 bp, Homo sapiens
  misc_feature: 720 for SV(C|O) and mtDNA
acgggggaaggcgctttgtgaagtaggccttatttctcttgtcctttcgtacagggaggaatttgaagtagatagaaaccgacctggattactccggtctgaactcagatcacgtaggac

SEQ ID NO: 71709 - DNA, 120 bp, Homo sapiens
  misc_feature: 720 for SV(C|O) and mtDNA
cgtctgtaatattgaacgtaggtgcgataaataataggatgaggcaggaatcaaagacagatactgcgacatagggtgctccggctccagcgtctcgcaatgctatcgcgtgcacacccc

SEQ ID NO: 71710 - DNA, 120 bp, Homo sapiens
  misc_feature: 720 for SV(C|O) and mtDNA
cctaaacctactccaatgctaaaactaatcgtcccaacaattatattactaccactgacatgactttccaaaaaacacataatttgaatcaacacaaccacccacagcctaattattagc

SEQ ID NO: 71711 - DNA, 120 bp, Homo sapiens
  misc_feature: 720 for SV(C|O) and mtDNA
cgaataatgctacagggatgaatattatggagaagtagtctagtttgaagcttagggagagctgggttgtttgggttgtggctcagtgtcagttcgagataataacttcttggtctaggc

SEQ ID NO: 71712 - DNA, 120 bp, Homo sapiens
  misc_feature: 720 for SV(C|O) and mtDNA
aattaggagggcactggcccccaacaggcatcaccccgctaaatcccctagaagtcccactcctaaacacatccgtattactcgcatcaggagtatcaatcacctgagctcaccatagtc

SEQ ID NO: 71713 - DNA, 120 bp, Homo sapiens
  misc_feature: 720 for SV(C|O) and mtDNA
aaattagaatcttagctttgggtgctaatggtggagttaaagactttttctctgatttgtccttggaaaaaggttttcatctccggtttacaagactggtgtattagtttatactacaag

SEQ ID NO: 71714 - DNA, 120 bp, Homo sapiens
  misc_feature: 720 for SV(C|O) and mtDNA
cactagacatcgtactacacgacacgtactacgttgtagctcacttccactatgtcctatcaataggagctgtatttgccatcataggaggcttcattcactgatttcccctattctcag

SEQ ID NO: 71715 - DNA, 120 bp, Homo sapiens
  misc_feature: 720 for SV(C|O) and mtDNA
cattttatttctccaacatactcggattctaccctaccatcacacaccgcacaatcccctatctaggccttcttacgagccaaaacctgcccctactcctcctagacctaacctgactag

SEQ ID NO: 71716 - DNA, 120 bp, Homo sapiens; identical to SEQ ID NO: 52703
  misc_feature: 720 for SV(C|O) and mtDNA

SEQ ID NO: 71717 - DNA, 120 bp, Homo sapiens
  misc_feature: 720 for SV(C|O) and mtDNA
cccgtaggggcctacaacgttggggcctttgcgtagttgtatatagcctagaatttttcgttcggtaagcattaggaatgccattgcgattagaatgggtacaatgaggagtaggaggtt

SEQ ID NO: 71718 - DNA, 120 bp, Homo sapiens
  misc_feature: 720 for SV(C|O) and mtDNA
aacccactccaccttactaccagacaaccttagccaaaccatttacccaaataaagtataggcgatagaaattgaaacctggcgcaatagatatagtaccgcaagggaaagatgaaaaat

SEQ ID NO: 71719 - DNA, 120 bp, Homo sapiens
  misc_feature: 720 for SV(C|O) and mtDNA
agtagctattaccttcttattatttgatctagaaattgccctccttttacccctaccatgagccctacaaacaactaacctaccactaatagttatgtcatccctcttattaatcatcat

SEQ ID NO: 71720 - DNA, 120 bp, Homo sapiens; identical to SEQ ID NO: 54512
  misc_feature: 720 for SV(C|O) and mtDNA

SEQ ID NO: 71721 - DNA, 120 bp, Homo sapiens; identical to SEQ ID NO: 58044
  misc_feature: 719 for SV(C|O) and mtDNA

SEQ ID NO: 71722 - DNA, 120 bp, Homo sapiens
  misc_feature: 719 for SV(C|O) and mtDNA
accctagggataacagcgcaatcctattctagagtccatatcaacaatagggtttacgacctcgatgttggatcaggacatcccgatggtgcagccgctattaaaggttcgtttgttcaa

SEQ ID NO: 71723 - DNA, 120 bp, Homo sapiens
  misc_feature: 719 for SV(C|O) and mtDNA
tgtatgattatgggcgttgattagtagtagttactggttgaacattgtttgttggtgtatatattgtaattgagattgctcgggggaataggttatgtgattaggagtagggttaggatg

SEQ ID NO: 71724 - DNA, 120 bp, Homo sapiens
  misc_feature: 719 for SV(C|O) and mtDNA
tccgacggcatctacggctcaacattttttgtagccacaggcttccacggacttcacgtcattattggctcaactttcctcactatctgcttcatccgccaactaatatttcactttaca

SEQ ID NO: 71725 - DNA, 120 bp, Homo sapiens
  misc_feature: 719 for SV(C|O) and mtDNA
tgggggcatgagttagcagttcttgtgagctttctcggtaaataaggggtcgtaagcctctgttgtcagattcacaatctgatgttttggttaaactatatttacaagaggaaaacccgg

SEQ ID NO: 71726 - DNA, 120 bp, Homo sapiens; identical to SEQ ID NO: 56790
  misc_feature: 719 for SV(C|O) and mtDNA

SEQ ID NO: 71727 - DNA, 120 bp, Homo sapiens
  misc_feature: 719 for SV(C|O) and mtDNA
tggcccccaacaggcatcaccccgctaaatcccctagaagtcccactcctaaacacatccgtattactcgcatcaggagtatcaatcacctgagctcaccatagtctaatagaaaacaac

SEQ ID NO: 71728 - DNA, 120 bp, Homo sapiens
  misc_feature: 719 for SV(C|O) and mtDNA
tgcgagacgctggagccggagcaccctatgtcgcagtatctgtctttgattcctgcctcatcctattatttatcgcacctacgttcaatattacagacgaacatacttactaaagtgtgt

SEQ ID NO: 71729 - DNA, 120 bp, Homo sapiens
  misc_feature: 719 for SV(C|O) and mtDNA
tgagtttatatatcacagtgagaattctatgatggaccatgtaacgaataatgctacagggatgaatattatggagaagtagtctagtttgaagcttagggagagctgggttgtttgggt

SEQ ID NO: 71730 - DNA, 120 bp, Homo sapiens
  misc_feature: 719 for SV(C|O) and mtDNA
taaccaagcataatacagcaaggactaacccctataccttctgcataatgaattaactagaaataactttgcaaggagagccaaagctaagacccccgaaaccagacgagctacctaaga

SEQ ID NO: 71731 - DNA, 120 bp, Homo sapiens
  misc_feature: 719 for SV(C|O) and mtDNA
tcttaattggtggctgcttttaggcctactatgggtgttaaattttttactctctctacaaggttttttcctagtgtccaaagagctgttcctctttggactaacagttaaatttacaag

SEQ ID NO: 71732 - DNA, 120 bp, Homo sapiens
  misc_feature: 719 for SV(C|O) and mtDNA
agtgggcgaaatattatgctttgttgtttggatatatggaggatggggattattgctaggatgaggatggatagtaatagggcaaggacgcctcctagtttgttagggacggatcggaga

SEQ ID NO: 71733 - DNA, 120 bp, Homo sapiens
  misc_feature: 719 for SV(C|O) and mtDNA
tctaggaatactagtataccgctcacacctcatatcctccctactatgcctagaaggaataatactatcactgttcattatagctactctcataaccctcaacacccactccctcttagc

SEQ ID NO: 71734 - DNA, 120 bp, Homo sapiens; identical to SEQ ID NO: 52780
  misc_feature: 719 for SV(C|O) and mtDNA

SEQ ID NO: 71735 - DNA, 120 bp, Homo sapiens
  misc_feature: 719 for SV(C|O) and mtDNA
gaattctatgatggaccatgtaacgaataatgctacagggatgaatattatggagaagtagtctagtttgaagcttagggagagctgggttgtttgggttgtggctcagtgtcagttcga

SEQ ID NO: 71736 - DNA, 120 bp, Homo sapiens; identical to SEQ ID NO: 52554
  misc_feature: 719 for SV(C|O) and mtDNA

SEQ ID NO: 71737 - DNA, 120 bp, Homo sapiens
  misc_feature: 719 for SV(C|O) and mtDNA
taggccccaaaaattttggtgcaactccaaataaaagtaacaaccatgcacactactataaccaccctaaccctgacttccctaattccccccatccttaccaccctcgttaaccctaac

SEQ ID NO: 71738 - DNA, 120 bp, Homo sapiens
  misc_feature: 719 for SV(C|O) and mtDNA
tagagtaaataataggagcttaaacccccttatttctaggactatgagaatcgaacccatccctgagaatccaaaattctccgtgccacctatcacaccccatcctaaagtaaggtcagc

SEQ ID NO: 71739 - DNA, 120 bp, Homo sapiens; identical to SEQ ID NO: 58145
  misc_feature: 719 for SV(C|O) and mtDNA

SEQ ID NO: 71740 - DNA, 120 bp, Homo sapiens
  misc_feature: 719 for SV(C|O) and mtDNA
acttcaaaggacatttaactaaaacccctacgcatttatatagaggagacaagtcgtaacatggtaagtgtactggaaagtgcacttggacgaaccagagtgtagcttaacacaaagcac

SEQ ID NO: 71741 - DNA, 120 bp, Homo sapiens; identical to SEQ ID NO: 55029
  misc_feature: 719 for SV(C|O) and mtDNA

SEQ ID NO: 71742 - DNA, 120 bp, Homo sapiens
  misc_feature: 719 for SV(C|O) and mtDNA
gtagatgccgtcggaaatggtgaagggagactcgaagtactctgaggcttgtaggagggtaaaatagagacccagtaaaattgtaataagcagtgcttgaattatttggtttcggttgtt

SEQ ID NO: 71743 - DNA, 120 bp, Homo sapiens
  misc_feature: 719 for SV(C|O) and mtDNA
gtacatagcacattacagtcaaatcccttctcgtccccatggatgacccccctcagataggggtcccttgaccaccatcctccgtgaaatcaatatcccgcacaagagtgctactctcct

SEQ ID NO: 71744 - DNA, 120 bp, Homo sapiens
  misc_feature: 719 for SV(C|O) and mtDNA
cccaccccatccaacatctccgcatgatgaaacttcggctcactccttggcgcctgcctgatcctccaaatcaccacaggactattcctagccatgcactactcaccagacgcctcaacc

SEQ ID NO: 71745 - DNA, 120 bp, Homo sapiens
  misc_feature: 719 for SV(C|O) and mtDNA
gggtctgagtttatatatcacagtgagaattctatgatggaccatgtaacgaataatgctacagggatgaatattatggagaagtagtctagtttgaagcttagggagagctgggttgtt

SEQ ID NO: 71746 - DNA, 120 bp, Homo sapiens
  misc_feature: 719 for SV(C|O) and mtDNA
aatcacactactccccatatctaacaacgtaaaaataaaatgacagtttgaacatacaaaacccaccccattcctccccacactcatcgcccttaccacgctactcctacctatctcccc

SEQ ID NO: 71747 - DNA, 120 bp, Homo sapiens
  misc_feature: 719 for SV(C|O) and mtDNA
ggcaagtactattgacccagcgatgggggcttcgacatgggctttagggagtcataagtggagtccgtaaagaggtatctttactataaaagctattgtgtaagctagtcatattaagtt

SEQ ID NO: 71748 - DNA, 120 bp, Homo sapiens
  misc_feature: 719 for SV(C|O) and mtDNA
cggactacaaccacgaccaatgatatgaaaaaccatcgttgtatttcaactacaagaacaccaatgaccccaatacgcaaaattaaccccctaataaaattaattaaccactcattcatc

SEQ ID NO: 71749 - DNA, 120 bp, Homo sapiens; identical to SEQ ID NO: 60277
  misc_feature: 719 for SV(C|O) and mtDNA

SEQ ID NO: 71750 - DNA, 120 bp, Homo sapiens; identical to SEQ ID NO: 59527
  misc_feature: 719 for SV(C|O) and mtDNA

SEQ ID NO: 71751 - DNA, 120 bp, Homo sapiens; identical to SEQ ID NO: 61089
  misc_feature: 719 for SV(C|O) and mtDNA

SEQ ID NO: 71752 - DNA, 120 bp, Homo sapiens
  misc_feature: 719 for SV(C|O) and mtDNA
actcgtaaggggtggatttttctatgtagccgttgagttgtggtagtcaaaatgtaataattattagtagtaaggctaggagggtgttgattattaaaattaaggcgaagtttattactc

SEQ ID NO: 71753 - DNA, 120 bp, Homo sapiens
  misc_feature: 719 for SV(C|O) and mtDNA
cttaattggtggctgcttttaggcctactatgggtgttaaattttttactctctctacaaggttttttcctagtgtccaaagagctgttcctctttggactaacagttaaatttacaagg

SEQ ID NO: 71754 - DNA, 120 bp, Homo sapiens; identical to SEQ ID NO: 59968
  misc_feature: 719 for SV(C|O) and mtDNA

SEQ ID NO: 71755 - DNA, 120 bp, Homo sapiens; identical to SEQ ID NO: 53811
  misc_feature: 719 for SV(C|O) and mtDNA

SEQ ID NO: 71756 - DNA, 120 bp, Homo sapiens
  misc_feature: 719 for SV(C|O) and mtDNA
aattctatgatggaccatgtaacgaataatgctacagggatgaatattatggagaagtagtctagtttgaagcttagggagagctgggttgtttgggttgtggctcagtgtcagttcgag

SEQ ID NO: 71757 - DNA, 120 bp, Homo sapiens
  misc_feature: 719 for SV(C|O) and mtDNA
actttttctctgatttgtccttggaaaaaggttttcatctccggtttacaagactggtgtattagtttatactacaaggacaggcccatttgagtattttgttttcaattagggagatag

SEQ ID NO: 71758 - DNA, 120 bp, Homo sapiens
  misc_feature: 719 for SV(C|O) and mtDNA
ctaaataggttgttgttgatttggttaaaaaatagtagagggatgatgctaataattaggctgtgggtggttgtgttgattcaaattatgtgttttttggaaagtcatgtcagtggtagt

SEQ ID NO: 71759 - DNA, 120 bp, Homo sapiens
  misc_feature: 719 for SV(C|O) and mtDNA
cccgacgttactcggactaccccgatgcatacaccacatgaaacatcctatcatctgtaggctcattcatttctctaacagcagtaatattaataattttcatgatttgagaagccttcg

SEQ ID NO: 71760 - DNA, 120 bp, Homo sapiens
  misc_feature: 719 for SV(C|O) and mtDNA
attgctaggatgaggatggatagtaatagggcaaggacgcctcctagtttgttagggacggatcggagaattgtgtaggcgaataggaaatatcattcgggcttgatgtggggaggggtg

SEQ ID NO: 71761 - DNA, 120 bp, Homo sapiens; identical to SEQ ID NO: 53907
  misc_feature: 719 for SV(C|O) and mtDNA

SEQ ID NO: 71762 - DNA, 120 bp, Homo sapiens
  misc_feature: 719 for SV(C|O) and mtDNA
atgattatgggcgttgattagtagtagttactggttgaacattgtttgttggtgtatatattgtaattgagattgctcgggggaataggttatgtgattaggagtagggttaggatgagt

SEQ ID NO: 71763 - DNA, 120 bp, Homo sapiens; identical to SEQ ID NO: 52511
  misc_feature: 718 for SV(C|O) and mtDNA

SEQ ID NO: 71764 - DNA, 120 bp, Homo sapiens; identical to SEQ ID NO: 56184
  misc_feature: 718 for SV(C|O) and mtDNA

SEQ ID NO: 71765 - DNA, 120 bp, Homo sapiens
  misc_feature: 718 for SV(C|O) and mtDNA
gtaaaaaactccagctgacacaaaatagactacgaaagtggctttaacatatctgaacacacaatagctaagacccaaactgggattagataccccactatgcttagccctaaacctcaa

SEQ ID NO: 71766 - DNA, 120 bp, Homo sapiens
  misc_feature: 718 for SV(C|O) and mtDNA
ttatactagcatttaccatctcacttctaggaatactagtataccgctcacacctcatatcctccctactatgcctagaaggaataatactatcactgttcattatagctactctcataa

SEQ ID NO: 71767 - DNA, 120 bp, Homo sapiens; identical to SEQ ID NO: 58076
  misc_feature: 718 for SV(C|O) and mtDNA

SEQ ID NO: 71768 - DNA, 120 bp, Homo sapiens
  misc_feature: 718 for SV(C|O) and mtDNA
ttagtagctattaccttcttattatttgatctagaaattgccctccttttacccctaccatgagccctacaaacaactaacctaccactaatagttatgtcatccctcttattaatcatc

SEQ ID NO: 71769 - DNA, 120 bp, Homo sapiens
  misc_feature: 718 for SV(C|O) and mtDNA
cactatgcacattttatttctccaacatactcggattctaccctaccatcacacaccgcacaatcccctatctaggccttcttacgagccaaaacctgcccctactcctcctagacctaa

SEQ ID NO: 71770 - DNA, 120 bp, Homo sapiens
  misc_feature: 718 for SV(C|O) and mtDNA
tataaccaagcataatacagcaaggactaacccctataccttctgcataatgaattaactagaaataactttgcaaggagagccaaagctaagacccccgaaaccagacgagctacctaa

SEQ ID NO: 71771 - DNA, 120 bp, Homo sapiens
  misc_feature: 718 for SV(C|O) and mtDNA
ttaagctcctattatttactctatcaaagtaactcttttatcagacatatttcttaggtttgagggggaatgctggagattgtaatgggtatggagacatatcatataagtaatgctagg

SEQ ID NO: 71772 - DNA, 120 bp, Homo sapiens; identical to SEQ ID NO: 56307
  misc_feature: 718 for SV(C|O) and mtDNA

SEQ ID NO: 71773 - DNA, 120 bp, Homo sapiens
  misc_feature: 718 for SV(C|O) and mtDNA
tgttggtatcctagtgggtgaggggtggctttggagttgcagttgatgtgtgatagttgagggttgattgctgtacttgcttgtaagcatggggagggggttttgatgtggattgggttt

SEQ ID NO: 71774 - DNA, 120 bp, Homo sapiens
  misc_feature: 718 for SV(C|O) and mtDNA
agtgggtgaggggtggctttggagttgcagttgatgtgtgatagttgagggttgattgctgtacttgcttgtaagcatggggagggggttttgatgtggattgggtttttatgtactaca

SEQ ID NO: 71775 - DNA, 120 bp, Homo sapiens
  misc_feature: 718 for SV(C|O) and mtDNA
acatcgtactacacgacacgtactacgttgtagctcacttccactatgtcctatcaataggagctgtatttgccatcataggaggcttcattcactgatttcccctattctcaggctaca

SEQ ID NO: 71776 - DNA, 120 bp, Homo sapiens; identical to SEQ ID NO: 58260
  misc_feature: 718 for SV(C|O) and mtDNA

SEQ ID NO: 71777 - DNA, 120 bp, Homo sapiens
  misc_feature: 718 for SV(C|O) and mtDNA
attgcgattagaatgggtacaatgaggagtaggaggttggccatgggtatgttgttaagaagaggaattgaacctctgactgtaaagttttaagttttatgcgattaccgggctctgcca

SEQ ID NO: 71778 - DNA, 120 bp, Homo sapiens
  misc_feature: 718 for SV(C|O) and mtDNA
acggcatctacggctcaacattttttgtagccacaggcttccacggacttcacgtcattattggctcaactttcctcactatctgcttcatccgccaactaatatttcactttacatcca

SEQ ID NO: 71779 - DNA, 120 bp, Homo sapiens; identical to SEQ ID NO: 59112
  misc_feature: 718 for SV(C|O) and mtDNA

SEQ ID NO: 71780 - DNA, 120 bp, Homo sapiens
  misc_feature: 718 for SV(C|O) and mtDNA
tagtagctattaccttcttattatttgatctagaaattgccctccttttacccctaccatgagccctacaaacaactaacctaccactaatagttatgtcatccctcttattaatcatca

SEQ ID NO: 71781 - DNA, 120 bp, Homo sapiens
  misc_feature: 718 for SV(C|O) and mtDNA
taccccccaattaggagggcactggcccccaacaggcatcaccccgctaaatcccctagaagtcccactcctaaacacatccgtattactcgcatcaggagtatcaatcacctgagctca

SEQ ID NO: 71782 - DNA, 120 bp, Homo sapiens; identical to SEQ ID NO: 56899
  misc_feature: 718 for SV(C|O) and mtDNA

SEQ ID NO: 71783 - DNA, 120 bp, Homo sapiens; identical to SEQ ID NO: 52733
  misc_feature: 718 for SV(C|O) and mtDNA

SEQ ID NO: 71784 - DNA, 120 bp, Homo sapiens; identical to SEQ ID NO: 55113
  misc_feature: 718 for SV(C|O) and mtDNA

SEQ ID NO: 71785 - DNA, 120 bp, Homo sapiens; identical to SEQ ID NO: 59014
  misc_feature: 718 for SV(C|O) and mtDNA

SEQ ID NO: 71786 - DNA, 120 bp, Homo sapiens
  misc_feature: 718 for SV(C|O) and mtDNA
gtagcccgtaggggcctacaacgttggggcctttgcgtagttgtatatagcctagaatttttcgttcggtaagcattaggaatgccattgcgattagaatgggtacaatgaggagtagga

SEQ ID NO: 71787 - DNA, 120 bp, Homo sapiens
  misc_feature: 718 for SV(C|O) and mtDNA
tcacgcaagcaaccgcatccataatccttctaatagctatcctcttcaacaatatactctccggacaatgaaccataaccaatactaccaatcaatactcatcattaataatcataatgg

SEQ ID NO: 71788 - DNA, 120 bp, Homo sapiens
  misc_feature: 718 for SV(C|O) and mtDNA
ctatttattacctcagaagtttttttcttcgcaggatttttctgagccttttaccactccagcctagcccctaccccccaattaggagggcactggcccccaacaggcatcaccccgcta

SEQ ID NO: 71789 - DNA, 120 bp, Homo sapiens
  misc_feature: 718 for SV(C|O) and mtDNA
tacatagcacattacagtcaaatcccttctcgtccccatggatgacccccctcagataggggtcccttgaccaccatcctccgtgaaatcaatatcccgcacaagagtgctactctcctc

SEQ ID NO: 71790 - DNA, 120 bp, Homo sapiens
  misc_feature: 718 for SV(C|O) and mtDNA
taatgtttgggtctgagtttatatatcacagtgagaattctatgatggaccatgtaacgaataatgctacagggatgaatattatggagaagtagtctagtttgaagcttagggagagct

SEQ ID NO: 71791 - DNA, 120 bp, Homo sapiens
  misc_feature: 718 for SV(C|O) and mtDNA
gtttgggtctgagtttatatatcacagtgagaattctatgatggaccatgtaacgaataatgctacagggatgaatattatggagaagtagtctagtttgaagcttagggagagctgggt

SEQ ID NO: 71792 - DNA, 120 bp, Homo sapiens
  misc_feature: 718 for SV(C|O) and mtDNA
aataatgctacagggatgaatattatggagaagtagtctagtttgaagcttagggagagctgggttgtttgggttgtggctcagtgtcagttcgagataataacttcttggtctaggcac

SEQ ID NO: 71793 - DNA, 120 bp, Homo sapiens
  misc_feature: 718 for SV(C|O) and mtDNA
aaacctggagtgactatatggatgccccccaccctaccacacattcgaagaacccgtatacataaaatctagacaaaaaaggaaggaatcgaaccccccaaagctggtttcaagccaacc

SEQ ID NO: 71794 - DNA, 120 bp, Homo sapiens
  misc_feature: 718 for SV(C|O) and mtDNA
cgaacctgatctcttatactagtatccttaatcatttttattgccacaactaacctcctcggactcctgcctcactcatttacaccaaccacccaactatctataaacctagccatggcc

SEQ ID NO: 71795 - DNA, 120 bp, Homo sapiens
  misc_feature: 718 for SV(C|O) and mtDNA
gagtttatatatcacagtgagaattctatgatggaccatgtaacgaataatgctacagggatgaatattatggagaagtagtctagtttgaagcttagggagagctgggttgtttgggtt

SEQ ID NO: 71796 - DNA, 120 bp, Homo sapiens; identical to SEQ ID NO: 53142
  misc_feature: 718 for SV(C|O) and mtDNA

SEQ ID NO: 71797 - DNA, 120 bp, Homo sapiens
  misc_feature: 718 for SV(C|O) and mtDNA
ataaccaagcataatacagcaaggactaacccctataccttctgcataatgaattaactagaaataactttgcaaggagagccaaagctaagacccccgaaaccagacgagctacctaag

SEQ ID NO: 71798 - DNA, 120 bp, Homo sapiens
  misc_feature: 718 for SV(C|O) and mtDNA
cgatttctaggatagtcagtagaattagaattgtgaagatgataagtgtagagggaaggttaatggttgatattgctagggtggcgcttccaattaggtgcatgagtaggtggcctgcag

SEQ ID NO: 71799 - DNA, 120 bp, Homo sapiens
  misc_feature: 718 for SV(C|O) and mtDNA
ctgaataatttatgaaggagaggggtcagggttgattcgggaggatcctattggtgcgggggctttgtatgattatgggcgttgattagtagtagttactggttgaacattgtttgttgg

SEQ ID NO: 71800 - DNA, 120 bp, Homo sapiens
  misc_feature: 718 for SV(C|O) and mtDNA
atgggggcatgagttagcagttcttgtgagctttctcggtaaataaggggtcgtaagcctctgttgtcagattcacaatctgatgttttggttaaactatatttacaagaggaaaacccg

SEQ ID NO: 71801 - DNA, 120 bp, Homo sapiens
  misc_feature: 718 for SV(C|O) and mtDNA
aagccttctcctatttatgggggtttagtattgattgttagcggtgtggtcgggtgtgttattattctgaattttgggggaggttatatgggtttaatagtttttttaatttatttaggg

SEQ ID NO: 71802 - DNA, 120 bp, Homo sapiens; identical to SEQ ID NO: 53045
  misc_feature: 718 for SV(C|O) and mtDNA

SEQ ID NO: 71803 - DNA, 120 bp, Homo sapiens
  misc_feature: 718 for SV(C|O) and mtDNA
cccatccaacatctccgcatgatgaaacttcggctcactccttggcgcctgcctgatcctccaaatcaccacaggactattcctagccatgcactactcaccagacgcctcaaccgcctt

SEQ ID NO: 71804 - DNA, 120 bp, Homo sapiens
  misc_feature: 718 for SV(C|O) and mtDNA
aggcctttttggacaggtggtgtgtggtggccttggtatgtgctttctcgtgttacatcgcgccatcattggtatatggttagtgtgttggttagtaggcctagtatgaggagcgttatg

SEQ ID NO: 71805 - DNA, 120 bp, Homo sapiens
  misc_feature: 718 for SV(C|O) and mtDNA
aagaaaaaaacttctgaggtaataaataggattatcccgtatcgaaggcctttttggacaggtggtgtgtggtggccttggtatgtgctttctcgtgttacatcgcgccatcattggtat

SEQ ID NO: 71806 - DNA, 120 bp, Homo sapiens
  misc_feature: 717 for SV(C|O) and mtDNA
tttttctctgatttgtccttggaaaaaggttttcatctccggtttacaagactggtgtattagtttatactacaaggacaggcccatttgagtattttgttttcaattagggagatagtt

SEQ ID NO: 71807 - DNA, 120 bp, Homo sapiens
  misc_feature: 717 for SV(C|O) and mtDNA
acattcgaagaacccgtatacataaaatctagacaaaaaaggaaggaatcgaaccccccaaagctggtttcaagccaaccccatggcctccatgactttttcaaaaaggtattagaaaaa

SEQ ID NO: 71808 - DNA, 120 bp, Homo sapiens; identical to SEQ ID NO: 57220
  misc_feature: 717 for SV(C|O) and mtDNA

SEQ ID NO: 71809 - DNA, 120 bp, Homo sapiens; identical to SEQ ID NO: 54137
  misc_feature: 717 for SV(C|O) and mtDNA

SEQ ID NO: 71810 - DNA, 120 bp, Homo sapiens
  misc_feature: 717 for SV(C|O) and mtDNA
ggagcctactagggtgtagaataggaagtatgtgcctgcgttcaggcgttctggctggttgcctcatcgggtgatgatagccaaggtggggataagtgtggtttcgaagaagatataaaa

SEQ ID NO: 71811 - DNA, 120 bp, Homo sapiens
  misc_feature: 717 for SV(C|O) and mtDNA
tttaccactccagcctagcccctaccccccaattaggagggcactggcccccaacaggcatcaccccgctaaatcccctagaagtcccactcctaaacacatccgtattactcgcatcag

SEQ ID NO: 71812 - DNA, 120 bp, Homo sapiens; identical to SEQ ID NO: 59041
  misc_feature: 717 for SV(C|O) and mtDNA

SEQ ID NO: 71813 - DNA, 120 bp, Homo sapiens
  misc_feature: 717 for SV(C|O) and mtDNA
ttgtagtagcccgtaggggcctacaacgttggggcctttgcgtagttgtatatagcctagaatttttcgttcggtaagcattaggaatgccattgcgattagaatgggtacaatgaggag

SEQ ID NO: 71814 - DNA, 120 bp, Homo sapiens
  misc_feature: 717 for SV(C|O) and mtDNA
tccccaccccatccaacatctccgcatgatgaaacttcggctcactccttggcgcctgcctgatcctccaaatcaccacaggactattcctagccatgcactactcaccagacgcctcaa

SEQ ID NO: 71815 - DNA, 120 bp, Homo sapiens; identical to SEQ ID NO: 56508
  misc_feature: 717 for SV(C|O) and mtDNA

SEQ ID NO: 71816 - DNA, 120 bp, Homo sapiens
  misc_feature: 717 for SV(C|O) and mtDNA
gtgggcgaaatattatgctttgttgtttggatatatggaggatggggattattgctaggatgaggatggatagtaatagggcaaggacgcctcctagtttgttagggacggatcggagaa

SEQ ID NO: 71817 - DNA, 120 bp, Homo sapiens
  misc_feature: 717 for SV(C|O) and mtDNA
ttaattggtggctgcttttaggcctactatgggtgttaaattttttactctctctacaaggttttttcctagtgtccaaagagctgttcctctttggactaacagttaaatttacaaggg

SEQ ID NO: 71818 - DNA, 120 bp, Homo sapiens
  misc_feature: 717 for SV(C|O) and mtDNA
tcctccctgtacgaaaggacaagagaaataaggcctacttcacaaagcgccttcccccgtaaatgatatcatctcaacttagtattatacccacacccacccaagaacagggtttgttaa

SEQ ID NO: 71819 - DNA, 120 bp, Homo sapiens
  misc_feature: 717 for SV(C|O) and mtDNA
tcaccctatagaagaactaatgttagtataagtaacatgaaaacattctcctccgcataagcctgcgtcagattaaaacactgaactgacaattaacagcccaatatctacaatcaacca

SEQ ID NO: 71820 - DNA, 120 bp, Homo sapiens
  misc_feature: 717 for SV(C|O) and mtDNA
aactatcaaactcctgagccaacaacttaatatgactagcttacacaatagcttttatagtaaagatacctctttacggactccacttatgactccctaaagcccatgtcgaagccccca

SEQ ID NO: 71821 - DNA, 120 bp, Homo sapiens
  misc_feature: 717 for SV(C|O) and mtDNA
tgggcgaaatattatgctttgttgtttggatatatggaggatggggattattgctaggatgaggatggatagtaatagggcaaggacgcctcctagtttgttagggacggatcggagaat

SEQ ID NO: 71822 - DNA, 120 bp, Homo sapiens
  misc_feature: 717 for SV(C|O) and mtDNA
tgcacattttatttctccaacatactcggattctaccctaccatcacacaccgcacaatcccctatctaggccttcttacgagccaaaacctgcccctactcctcctagacctaacctga

SEQ ID NO: 71823 - DNA, 120 bp, Homo sapiens
  misc_feature: 717 for SV(C|O) and mtDNA
tcgtctgtaatattgaacgtaggtgcgataaataataggatgaggcaggaatcaaagacagatactgcgacatagggtgctccggctccagcgtctcgcaatgctatcgcgtgcacaccc

SEQ ID NO: 71824 - DNA, 120 bp, Homo sapiens
  misc_feature: 717 for SV(C|O) and mtDNA
tcgaaggcctttttggacaggtggtgtgtggtggccttggtatgtgctttctcgtgttacatcgcgccatcattggtatatggttagtgtgttggttagtaggcctagtatgaggagcgt

SEQ ID NO: 71825 - DNA, 120 bp, Homo sapiens
  misc_feature: 717 for SV(C|O) and mtDNA
gcgaaaagtcctaatagtagaagaaccctccataaacctggagtgactatatggatgccccccaccctaccacacattcgaagaacccgtatacataaaatctagacaaaaaaggaagga

SEQ ID NO: 71826 - DNA, 120 bp, Homo sapiens
  misc_feature: 717 for SV(C|O) and mtDNA
accctcgttccacagaagctgccatcaagtatttcctcacgcaagcaaccgcatccataatccttctaatagctatcctcttcaacaatatactctccggacaatgaaccataaccaata

SEQ ID NO: 71827 - DNA, 120 bp, Homo sapiens
  misc_feature: 717 for SV(C|O) and mtDNA
tatgtgttttgtcagggggttgagaatgagtgtgaggcgtattataccatagccgcctagttttaagagtactgcggcaagtactattgacccagcgatgggggcttcgacatgggcttt

SEQ ID NO: 71828 - DNA, 120 bp, Homo sapiens
  misc_feature: 717 for SV(C|O) and mtDNA
tatgtcgcagtatctgtctttgattcctgcctcatcctattatttatcgcacctacgttcaatattacagacgaacatacttactaaagtgtgttaattaattaatgcttgtaggacata

SEQ ID NO: 71829 - DNA, 120 bp, Homo sapiens
  misc_feature: 717 for SV(C|O) and mtDNA
tagtgggcgaaatattatgctttgttgtttggatatatggaggatggggattattgctaggatgaggatggatagtaatagggcaaggacgcctcctagtttgttagggacggatcggag

SEQ ID NO: 71830 - DNA, 120 bp, Homo sapiens
  misc_feature: 717 for SV(C|O) and mtDNA
tagatgccgtcggaaatggtgaagggagactcgaagtactctgaggcttgtaggagggtaaaatagagacccagtaaaattgtaataagcagtgcttgaattatttggtttcggttgttt

SEQ ID NO: 71831 - DNA, 120 bp, Homo sapiens
  misc_feature: 717 for SV(C|O) and mtDNA
agagtcagaagcttatgttgtttatgcggggaaacgccatatcgggggcaccgattattaggggaactagtcagttgccaaagcctccgattatgatgggtattactatgaagaagatta

SEQ ID NO: 71832 - DNA, 120 bp, Homo sapiens
  misc_feature: 717 for SV(C|O) and mtDNA
cctaaagcccatgtcgaagcccccatcgctgggtcaatagtacttgccgcagtactcttaaaactaggcggctatggtataatacgcctcacactcattctcaaccccctgacaaaacac

SEQ ID NO: 71833 - DNA, 120 bp, Homo sapiens
  misc_feature: 717 for SV(C|O) and mtDNA
acacctacaccccttatccccatactagttattatcgaaaccatcagcctactcattcaaccaatagccctggccgtacgcctaaccgctaacattactgcaggccacctactcatgcac

SEQ ID NO: 71834 - DNA, 120 bp, Homo sapiens
  misc_feature: 717 for SV(C|O) and mtDNA
cggtgggcctagccctactagtctcaatctccaacacatatggcctagactacgtacataacctaaacctactccaatgctaaaactaatcgtcccaacaattatattactaccactgac

SEQ ID NO: 71835 - DNA, 120 bp, Homo sapiens; identical to SEQ ID NO: 59500
  misc_feature: 717 for SV(C|O) and mtDNA

SEQ ID NO: 71836 - DNA, 120 bp, Homo sapiens; identical to SEQ ID NO: 58716
  misc_feature: 717 for SV(C|O) and mtDNA

SEQ ID NO: 71837 - DNA, 120 bp, Homo sapiens
  misc_feature: 717 for SV(C|O) and mtDNA
gcccgtaggggcctacaacgttggggcctttgcgtagttgtatatagcctagaatttttcgttcggtaagcattaggaatgccattgcgattagaatgggtacaatgaggagtaggaggt

SEQ ID NO: 71838 - DNA, 120 bp, Homo sapiens
  misc_feature: 717 for SV(C|O) and mtDNA
gagcctactagggtgtagaataggaagtatgtgcctgcgttcaggcgttctggctggttgcctcatcgggtgatgatagccaaggtggggataagtgtggtttcgaagaagatataaaat

SEQ ID NO: 71839 - DNA, 120 bp, Homo sapiens
  misc_feature: 717 for SV(C|O) and mtDNA
gacgctggagccggagcaccctatgtcgcagtatctgtctttgattcctgcctcatcctattatttatcgcacctacgttcaatattacagacgaacatacttactaaagtgtgttaatt

SEQ ID NO: 71840 - DNA, 120 bp, Homo sapiens
  misc_feature: 717 for SV(C|O) and mtDNA
atccaacatctccgcatgatgaaacttcggctcactccttggcgcctgcctgatcctccaaatcaccacaggactattcctagccatgcactactcaccagacgcctcaaccgccttttc

SEQ ID NO: 71841 - DNA, 120 bp, Homo sapiens
  misc_feature: 717 for SV(C|O) and mtDNA
gaaaaaaacttctgaggtaataaataggattatcccgtatcgaaggcctttttggacaggtggtgtgtggtggccttggtatgtgctttctcgtgttacatcgcgccatcattggtatat

SEQ ID NO: 71842 - DNA, 120 bp, Homo sapiens
  misc_feature: 717 for SV(C|O) and mtDNA
acagaaatagtcaaaccacgtctacaaaatgccagtatcaggcggcggcttcgaagccaaagtgatgtttggatgtaaagtgaaatattagttggcggatgaagcagatagtgaggaaag

SEQ ID NO: 71843 - DNA, 120 bp, Homo sapiens
  misc_feature: 717 for SV(C|O) and mtDNA
ataataggagcttaaacccccttatttctaggactatgagaatcgaacccatccctgagaatccaaaattctccgtgccacctatcacaccccatcctaaagtaaggtcagctaaataag

SEQ ID NO: 71844 - DNA, 120 bp, Homo sapiens
  misc_feature: 717 for SV(C|O) and mtDNA
cgtaggggcctacaacgttggggcctttgcgtagttgtatatagcctagaatttttcgttcggtaagcattaggaatgccattgcgattagaatgggtacaatgaggagtaggaggttgg

SEQ ID NO: 71845 - DNA, 120 bp, Homo sapiens
  misc_feature: 717 for SV(C|O) and mtDNA
ccgtagatgccgtcggaaatggtgaagggagactcgaagtactctgaggcttgtaggagggtaaaatagagacccagtaaaattgtaataagcagtgcttgaattatttggtttcggttg

SEQ ID NO: 71846 - DNA, 120 bp, Homo sapiens; identical to SEQ ID NO: 59057
  misc_feature: 717 for SV(C|O) and mtDNA

SEQ ID NO: 71847 - DNA, 120 bp, Homo sapiens; identical to SEQ ID NO: 61709
  misc_feature: 717 for SV(C|O) and mtDNA

SEQ ID NO: 71848 - DNA, 120 bp, Homo sapiens; identical to SEQ ID NO: 55281
  misc_feature: 717 for SV(C|O) and mtDNA

SEQ ID NO: 71849 - DNA, 120 bp, Homo sapiens; identical to SEQ ID NO: 54245
  misc_feature: 716 for SV(C|O) and mtDNA

SEQ ID NO: 71850 - DNA, 120 bp, Homo sapiens
  misc_feature: 716 for SV(C|O) and mtDNA
cccactaaaacactcaccaagacctcaacccctgacccccatgcctcaggatactcctcaatagccatcgctgtagtatatccaaagacaaccatcattccccctaaataaattaaaaaa

SEQ ID NO: 71851 - DNA, 120 bp, Homo sapiens
  misc_feature: 716 for SV(C|O) and mtDNA
tttctagtcaggttaggtctaggaggagtaggggcaggttttggctcgtaagaaggcctagataggggattgtgcggtgtgtgatggtagggtagaatccgagtatgttggagaaataaa

SEQ ID NO: 71852 - DNA, 120 bp, Homo sapiens
  misc_feature: 716 for SV(C|O) and mtDNA
tagacatgggggcatgagttagcagttcttgtgagctttctcggtaaataaggggtcgtaagcctctgttgtcagattcacaatctgatgttttggttaaactatatttacaagaggaaa

SEQ ID NO: 71853 - DNA, 120 bp, Homo sapiens
  misc_feature: 716 for SV(C|O) and mtDNA
gtaaataataggagcttaaacccccttatttctaggactatgagaatcgaacccatccctgagaatccaaaattctccgtgccacctatcacaccccatcctaaagtaaggtcagctaaa

SEQ ID NO: 71854 - DNA, 120 bp, Homo sapiens
  misc_feature: 716 for SV(C|O) and mtDNA
attaagagaaccaacacctctttacagtgaaatgccccaactaaatactaccgtatggcccaccataattacccccatactccttacactattcctcatcacccaactaaaaatattaaa

SEQ ID NO: 71855 - DNA, 120 bp, Homo sapiens; identical to SEQ ID NO: 51976
  misc_feature: 716 for SV(C|O) and mtDNA

SEQ ID NO: 71856 - DNA, 120 bp, Homo sapiens
  misc_feature: 716 for SV(C|O) and mtDNA
ttgtatatagcctagaatttttcgttcggtaagcattaggaatgccattgcgattagaatgggtacaatgaggagtaggaggttggccatgggtatgttgttaagaagaggaattgaacc

SEQ ID NO: 71857 - DNA, 120 bp, Homo sapiens; identical to SEQ ID NO: 60869
  misc_feature: 716 for SV(C|O) and mtDNA

SEQ ID NO: 71858 - DNA, 120 bp, Homo sapiens
  misc_feature: 716 for SV(C|O) and mtDNA
ttctcctatttatgggggtttagtattgattgttagcggtgtggtcgggtgtgttattattctgaattttgggggaggttatatgggtttaatagtttttttaatttatttagggggaat

SEQ ID NO: 71859 - DNA, 120 bp, Homo sapiens
  misc_feature: 716 for SV(C|O) and mtDNA
cccctctattgatccccacctccaaatatctcatcaacaaccgactaatcaccacccaacaatgactaatcaaactaacctcaaaacaaatgataaccatacacaacactaaaggacgaa

SEQ ID NO: 71860 - DNA, 120 bp, Homo sapiens
  misc_feature: 716 for SV(C|O) and mtDNA
ttaccactccagcctagcccctaccccccaattaggagggcactggcccccaacaggcatcaccccgctaaatcccctagaagtcccactcctaaacacatccgtattactcgcatcagg

SEQ ID NO: 71861 - DNA, 120 bp, Homo sapiens
  misc_feature: 716 for SV(C|O) and mtDNA
tggcgcaatagatatagtaccgcaagggaaagatgaaaaattataaccaagcataatacagcaaggactaacccctataccttctgcataatgaattaactagaaataactttgcaagga

SEQ ID NO: 71862 - DNA, 120 bp, Homo sapiens
  misc_feature: 716 for SV(C|O) and mtDNA
atgtctgataaaagagttactttgatagagtaaataataggagcttaaacccccttatttctaggactatgagaatcgaacccatccctgagaatccaaaattctccgtgccacctatca

SEQ ID NO: 71863 - DNA, 120 bp, Homo sapiens; identical to SEQ ID NO: 51736
  misc_feature: 716 for SV(C|O) and mtDNA

SEQ ID NO: 71864 - DNA, 120 bp, Homo sapiens
  misc_feature: 716 for SV(C|O) and mtDNA
ccccctctattgatccccacctccaaatatctcatcaacaaccgactaatcaccacccaacaatgactaatcaaactaacctcaaaacaaatgataaccatacacaacactaaaggacga

SEQ ID NO: 71865 - DNA, 120 bp, Homo sapiens
  misc_feature: 716 for SV(C|O) and mtDNA
tcctatttatgggggtttagtattgattgttagcggtgtggtcgggtgtgttattattctgaattttgggggaggttatatgggtttaatagtttttttaatttatttagggggaatgat

SEQ ID NO: 71866 - DNA, 120 bp, Homo sapiens; identical to SEQ ID NO: 56513
  misc_feature: 716 for SV(C|O) and mtDNA

SEQ ID NO: 71867 - DNA, 120 bp, Homo sapiens
  misc_feature: 716 for SV(C|O) and mtDNA
catatgtgttggagattgagactagtagggctaggcccaccgctgcttcgcaggcggcaaagactagtatggcaataggcacaatattggctaagagggagtgggtgttgagggttatga

SEQ ID NO: 71868 - DNA, 120 bp, Homo sapiens
  misc_feature: 716 for SV(C|O) and mtDNA
aatactaccgtatggcccaccataattacccccatactccttacactattcctcatcacccaactaaaaatattaaacacaaactaccacctacctccctcaccaaagcccataaaaata

SEQ ID NO: 71869 - DNA, 120 bp, Homo sapiens
  misc_feature: 716 for SV(C|O) and mtDNA
tatgattatgggcgttgattagtagtagttactggttgaacattgtttgttggtgtatatattgtaattgagattgctcgggggaataggttatgtgattaggagtagggttaggatgag

SEQ ID NO: 71870 - DNA, 120 bp, Homo sapiens
  misc_feature: 716 for SV(C|O) and mtDNA
gactttttctctgatttgtccttggaaaaaggttttcatctccggtttacaagactggtgtattagtttatactacaaggacaggcccatttgagtattttgttttcaattagggagata

SEQ ID NO: 71871 - DNA, 120 bp, Homo sapiens
  misc_feature: 716 for SV(C|O) and mtDNA
taacgaataatgctacagggatgaatattatggagaagtagtctagtttgaagcttagggagagctgggttgtttgggttgtggctcagtgtcagttcgagataataacttcttggtcta

SEQ ID NO: 71872 - DNA, 120 bp, Homo sapiens
  misc_feature: 716 for SV(C|O) and mtDNA
tactagggtgtagaataggaagtatgtgcctgcgttcaggcgttctggctggttgcctcatcgggtgatgatagccaaggtggggataagtgtggtttcgaagaagatataaaatatgat

SEQ ID NO: 71873 - DNA, 120 bp, Homo sapiens
  misc_feature: 716 for SV(C|O) and mtDNA
tactacaggtggtcaagtatttatggtaccgtacaatattcatggtggctggcagtaatgtacgaattacatagcggttgttgatgggtgagtcaatacttgggtggcacccaaatctgc

SEQ ID NO: 71874 - DNA, 120 bp, Homo sapiens
  misc_feature: 716 for SV(C|O) and mtDNA
taagccttctcctatttatgggggtttagtattgattgttagcggtgtggtcgggtgtgttattattctgaattttgggggaggttatatgggtttaatagtttttttaatttatttagg

SEQ ID NO: 71875 - DNA, 120 bp, Homo sapiens; identical to SEQ ID NO: 52254
  misc_feature: 716 for SV(C|O) and mtDNA

SEQ ID NO: 71876 - DNA, 120 bp, Homo sapiens
  misc_feature: 716 for SV(C|O) and mtDNA
ccccaccccatccaacatctccgcatgatgaaacttcggctcactccttggcgcctgcctgatcctccaaatcaccacaggactattcctagccatgcactactcaccagacgcctcaac

SEQ ID NO: 71877 - DNA, 120 bp, Homo sapiens
  misc_feature: 716 for SV(C|O) and mtDNA
gtccgtgggcgattatgagaatgactgcgccggtgaagcttcagggggtttggatgagaatggctgttactacgagggctatgtggctgattgaagagtatgcaatgagcgattttaggt

SEQ ID NO: 71878 - DNA, 120 bp, Homo sapiens
  misc_feature: 716 for SV(C|O) and mtDNA
gtagctattaccttcttattatttgatctagaaattgccctccttttacccctaccatgagccctacaaacaactaacctaccactaatagttatgtcatccctcttattaatcatcatc

SEQ ID NO: 71879 - DNA, 120 bp, Homo sapiens
  misc_feature: 716 for SV(C|O) and mtDNA
gtagcataatcacttgttccttaaatagggacctgtatgaatggctccacgagggttcagctgtctcttacttttaaccagtgaaattgacctgcccgtgaagaggcgggcatgacacag

SEQ ID NO: 71880 - DNA, 120 bp, Homo sapiens; identical to SEQ ID NO: 57810
  misc_feature: 716 for SV(C|O) and mtDNA

SEQ ID NO: 71881 - DNA, 120 bp, Homo sapiens
  misc_feature: 716 for SV(C|O) and mtDNA
ccccccaattaggagggcactggcccccaacaggcatcaccccgctaaatcccctagaagtcccactcctaaacacatccgtattactcgcatcaggagtatcaatcacctgagctcacc

SEQ ID NO: 71882 - DNA, 120 bp, Homo sapiens
  misc_feature: 716 for SV(C|O) and mtDNA
gggttgtagtagcccgtaggggcctacaacgttggggcctttgcgtagttgtatatagcctagaatttttcgttcggtaagcattaggaatgccattgcgattagaatgggtacaatgag

SEQ ID NO: 71883 - DNA, 120 bp, Homo sapiens
  misc_feature: 716 for SV(C|O) and mtDNA
gggtgaggggtggctttggagttgcagttgatgtgtgatagttgagggttgattgctgtacttgcttgtaagcatggggagggggttttgatgtggattgggtttttatgtactacaggt

SEQ ID NO: 71884 - DNA, 120 bp, Homo sapiens
  misc_feature: 716 for SV(C|O) and mtDNA
gagaatgttttcatgttacttatactaacattagttcttctatagggtgatagattggtccaattgggtgtgaggagttcagttatatgtttgggattttttaggtagtgggtgttgagc

SEQ ID NO: 71885 - DNA, 120 bp, Homo sapiens; identical to SEQ ID NO: 58086
  misc_feature: 716 for SV(C|O) and mtDNA

SEQ ID NO: 71886 - DNA, 120 bp, Homo sapiens
  misc_feature: 716 for SV(C|O) and mtDNA
aactagactacttctccataatattcatccctgtagcattattcgttacatggtccatcatagaattctcactgtgatatataaactcagacccaaacattaatcagttcttcaaatatc

SEQ ID NO: 71887 - DNA, 120 bp, Homo sapiens; identical to SEQ ID NO: 55842
  misc_feature: 716 for SV(C|O) and mtDNA

SEQ ID NO: 71888 - DNA, 120 bp, Homo sapiens
  misc_feature: 716 for SV(C|O) and mtDNA
gagtcagaagcttatgttgtttatgcggggaaacgccatatcgggggcaccgattattaggggaactagtcagttgccaaagcctccgattatgatgggtattactatgaagaagattat

SEQ ID NO: 71889 - DNA, 120 bp, Homo sapiens; identical to SEQ ID NO: 56131
  misc_feature: 716 for SV(C|O) and mtDNA

SEQ ID NO: 71890 - DNA, 120 bp, Homo sapiens
  misc_feature: 716 for SV(C|O) and mtDNA
gacatacagaaatagtcaaaccacgtctacaaaatgccagtatcaggcggcggcttcgaagccaaagtgatgtttggatgtaaagtgaaatattagttggcggatgaagcagatagtgag

SEQ ID NO: 71891 - DNA, 120 bp, Homo sapiens
  misc_feature: 716 for SV(C|O) and mtDNA
cttagtgggcgaaatattatgctttgttgtttggatatatggaggatggggattattgctaggatgaggatggatagtaatagggcaaggacgcctcctagtttgttagggacggatcgg

SEQ ID NO: 71892 - DNA, 120 bp, Homo sapiens; identical to SEQ ID NO: 53594
  misc_feature: 716 for SV(C|O) and mtDNA

SEQ ID NO: 71893 - DNA, 120 bp, Homo sapiens; identical to SEQ ID NO: 57819
  misc_feature: 716 for SV(C|O) and mtDNA

SEQ ID NO: 71894 - DNA, 120 bp, Homo sapiens
  misc_feature: 716 for SV(C|O) and mtDNA
aattagaatcttagctttgggtgctaatggtggagttaaagactttttctctgatttgtccttggaaaaaggttttcatctccggtttacaagactggtgtattagtttatactacaagg

SEQ ID NO: 71895 - DNA, 120 bp, Homo sapiens
  misc_feature: 716 for SV(C|O) and mtDNA
ccccatccaacatctccgcatgatgaaacttcggctcactccttggcgcctgcctgatcctccaaatcaccacaggactattcctagccatgcactactcaccagacgcctcaaccgcct

SEQ ID NO: 71896 - DNA, 120 bp, Homo sapiens
  misc_feature: 716 for SV(C|O) and mtDNA
aaaaaaacttctgaggtaataaataggattatcccgtatcgaaggcctttttggacaggtggtgtgtggtggccttggtatgtgctttctcgtgttacatcgcgccatcattggtatatg

SEQ ID NO: 71897 - DNA, 120 bp, Homo sapiens; identical to SEQ ID NO: 53118
  misc_feature: 716 for SV(C|O) and mtDNA

SEQ ID NO: 71898 - DNA, 120 bp, Homo sapiens; identical to SEQ ID NO: 56136
  misc_feature: 716 for SV(C|O) and mtDNA

SEQ ID NO: 71899 - DNA, 120 bp, Homo sapiens
  misc_feature: 716 for SV(C|O) and mtDNA
atctacggctcaacattttttgtagccacaggcttccacggacttcacgtcattattggctcaactttcctcactatctgcttcatccgccaactaatatttcactttacatccaaacat

SEQ ID NO: 71900 - DNA, 120 bp, Homo sapiens
  misc_feature: 716 for SV(C|O) and mtDNA
aacatactcggattctaccctaccatcacacaccgcacaatcccctatctaggccttcttacgagccaaaacctgcccctactcctcctagacctaacctgactagaaaagctattacct

SEQ ID NO: 71901 - DNA, 120 bp, Homo sapiens
  misc_feature: 716 for SV(C|O) and mtDNA
acctaaaaaatcccaaacatataactgaactcctcacacccaattggaccaatctatcaccctatagaagaactaatgttagtataagtaacatgaaaacattctcctccgcataagcct

SEQ ID NO: 71902 - DNA, 120 bp, Homo sapiens
  misc_feature: 716 for SV(C|O) and mtDNA
agctattaccttcttattatttgatctagaaattgccctccttttacccctaccatgagccctacaaacaactaacctaccactaatagttatgtcatccctcttattaatcatcatcct

SEQ ID NO: 71903 - DNA, 120 bp, Homo sapiens
  misc_feature: 716 for SV(C|O) and mtDNA
aagctcctattatttactctatcaaagtaactcttttatcagacatatttcttaggtttgagggggaatgctggagattgtaatgggtatggagacatatcatataagtaatgctagggt

SEQ ID NO: 71904 - DNA, 120 bp, Homo sapiens; identical to SEQ ID NO: 52950
  misc_feature: 715 for SV(C|O) and mtDNA

SEQ ID NO: 71905 - DNA, 120 bp, Homo sapiens; identical to SEQ ID NO: 56183
  misc_feature: 715 for SV(C|O) and mtDNA

SEQ ID NO: 71906 - DNA, 120 bp, Homo sapiens
  misc_feature: 715 for SV(C|O) and mtDNA
caccctatagaagaactaatgttagtataagtaacatgaaaacattctcctccgcataagcctgcgtcagattaaaacactgaactgacaattaacagcccaatatctacaatcaaccaa

SEQ ID NO: 71907 - DNA, 120 bp, Homo sapiens
  misc_feature: 715 for SV(C|O) and mtDNA
ttggtatcctagtgggtgaggggtggctttggagttgcagttgatgtgtgatagttgagggttgattgctgtacttgcttgtaagcatggggagggggttttgatgtggattgggttttt

SEQ ID NO: 71908 - DNA, 120 bp, Homo sapiens
  misc_feature: 715 for SV(C|O) and mtDNA
atactaccgtatggcccaccataattacccccatactccttacactattcctcatcacccaactaaaaatattaaacacaaactaccacctacctccctcaccaaagcccataaaaataa

SEQ ID NO: 71909 - DNA, 120 bp, Homo sapiens; identical to SEQ ID NO: 52567
  misc_feature: 715 for SV(C|O) and mtDNA

SEQ ID NO: 71910 - DNA, 120 bp, Homo sapiens
  misc_feature: 715 for SV(C|O) and mtDNA
ttaatgtttgggtctgagtttatatatcacagtgagaattctatgatggaccatgtaacgaataatgctacagggatgaatattatggagaagtagtctagtttgaagcttagggagagc

SEQ ID NO: 71911 - DNA, 120 bp, Homo sapiens
  misc_feature: 715 for SV(C|O) and mtDNA
tgggtgaggggtggctttggagttgcagttgatgtgtgatagttgagggttgattgctgtacttgcttgtaagcatggggagggggttttgatgtggattgggtttttatgtactacagg

SEQ ID NO: 71912 - DNA, 120 bp, Homo sapiens; identical to SEQ ID NO: 53372
  misc_feature: 715 for SV(C|O) and mtDNA

SEQ ID NO: 71913 - DNA, 120 bp, Homo sapiens; identical to SEQ ID NO: 60566
  misc_feature: 715 for SV(C|O) and mtDNA

SEQ ID NO: 71914 - DNA, 120 bp, Homo sapiens
  misc_feature: 715 for SV(C|O) and mtDNA
gttgtagtagcccgtaggggcctacaacgttggggcctttgcgtagttgtatatagcctagaatttttcgttcggtaagcattaggaatgccattgcgattagaatgggtacaatgagga

SEQ ID NO: 71915 - DNA, 120 bp, Homo sapiens
  misc_feature: 715 for SV(C|O) and mtDNA
ctcctatttatgggggtttagtattgattgttagcggtgtggtcgggtgtgttattattctgaattttgggggaggttatatgggtttaatagtttttttaatttatttagggggaatga

SEQ ID NO: 71916 - DNA, 120 bp, Homo sapiens; identical to SEQ ID NO: 53156
  misc_feature: 715 for SV(C|O) and mtDNA

SEQ ID NO: 71917 - DNA, 120 bp, Homo sapiens; identical to SEQ ID NO: 58915
  misc_feature: 715 for SV(C|O) and mtDNA

SEQ ID NO: 71918 - DNA, 120 bp, Homo sapiens
  misc_feature: 715 for SV(C|O) and mtDNA
taggatgaggcaggaatcaaagacagatactgcgacatagggtgctccggctccagcgtctcgcaatgctatcgcgtgcacaccccccagacgaaaataccaaatgcatggagagctccc

SEQ ID NO: 71919 - DNA, 120 bp, Homo sapiens; identical to SEQ ID NO: 55618
  misc_feature: 715 for SV(C|O) and mtDNA

SEQ ID NO: 71920 - DNA, 120 bp, Homo sapiens
  misc_feature: 715 for SV(C|O) and mtDNA
ccattatgtaaaatccattgtcgcatccacctttattatcagtctcttccccacaacaatattcatgtgcctagaccaagaagttattatctcgaactgacactgagccacaacccaaac

SEQ ID NO: 71921 - DNA, 120 bp, Homo sapiens
  misc_feature: 715 for SV(C|O) and mtDNA
gttggtatcctagtgggtgaggggtggctttggagttgcagttgatgtgtgatagttgagggttgattgctgtacttgcttgtaagcatggggagggggttttgatgtggattgggtttt

SEQ ID NO: 71922 - DNA, 120 bp, Homo sapiens
  misc_feature: 715 for SV(C|O) and mtDNA
gtcctgtggtgatttggaggatcaggcaggcgccaaggagtgagccgaagtttcatcatgcggagatgttggatggggtggggaggtcgatgaatgagtggttaattaattttattaggg

SEQ ID NO: 71923 - DNA, 120 bp, Homo sapiens; identical to SEQ ID NO: 56470
  misc_feature: 715 for SV(C|O) and mtDNA

SEQ ID NO: 71924 - DNA, 120 bp, Homo sapiens; identical to SEQ ID NO: 52688
  misc_feature: 715 for SV(C|O) and mtDNA

SEQ ID NO: 71925 - DNA, 120 bp, Homo sapiens; identical to SEQ ID NO: 53057
  misc_feature: 715 for SV(C|O) and mtDNA

SEQ ID NO: 71926 - DNA, 120 bp, Homo sapiens
  misc_feature: 715 for SV(C|O) and mtDNA
ggacgaacctgatctcttatactagtatccttaatcatttttattgccacaactaacctcctcggactcctgcctcactcatttacaccaaccacccaactatctataaacctagccatg

SEQ ID NO: 71927 - DNA, 120 bp, Homo sapiens
  misc_feature: 715 for SV(C|O) and mtDNA
gctggagccggagcaccctatgtcgcagtatctgtctttgattcctgcctcatcctattatttatcgcacctacgttcaatattacagacgaacatacttactaaagtgtgttaattaat

SEQ ID NO: 71928 - DNA, 120 bp, Homo sapiens
  misc_feature: 715 for SV(C|O) and mtDNA
gcccccaacaggcatcaccccgctaaatcccctagaagtcccactcctaaacacatccgtattactcgcatcaggagtatcaatcacctgagctcaccatagtctaatagaaaacaaccg

SEQ ID NO: 71929 - DNA, 120 bp, Homo sapiens; identical to SEQ ID NO: 61009
  misc_feature: 715 for SV(C|O) and mtDNA

SEQ ID NO: 71930 - DNA, 120 bp, Homo sapiens
  misc_feature: 715 for SV(C|O) and mtDNA
ctgagtttatatatcacagtgagaattctatgatggaccatgtaacgaataatgctacagggatgaatattatggagaagtagtctagtttgaagcttagggagagctgggttgtttggg

SEQ ID NO: 71931 - DNA, 120 bp, Homo sapiens
  misc_feature: 715 for SV(C|O) and mtDNA
ctagatcaaataataagaaggtaatagctactaagaagaattttatggagaaagggacgcgggcgggggatatagggtcgaagccgcactcgtaaggggtggatttttctatgtagccgt

SEQ ID NO: 71932 - DNA, 120 bp, Homo sapiens
  misc_feature: 715 for SV(C|O) and mtDNA
cgtagatgccgtcggaaatggtgaagggagactcgaagtactctgaggcttgtaggagggtaaaatagagacccagtaaaattgtaataagcagtgcttgaattatttggtttcggttgt

SEQ ID NO: 71933 - DNA, 120 bp, Homo sapiens
  misc_feature: 715 for SV(C|O) and mtDNA
aaggcctttttggacaggtggtgtgtggtggccttggtatgtgctttctcgtgttacatcgcgccatcattggtatatggttagtgtgttggttagtaggcctagtatgaggagcgttat

SEQ ID NO: 71934 - DNA, 120 bp, Homo sapiens; identical to SEQ ID NO: 53936
  misc_feature: 714 for SV(C|O) and mtDNA

SEQ ID NO: 71935 - DNA, 120 bp, Homo sapiens; identical to SEQ ID NO: 54053
  misc_feature: 714 for SV(C|O) and mtDNA

SEQ ID NO: 71936 - DNA, 120 bp, Homo sapiens
  misc_feature: 714 for SV(C|O) and mtDNA
tacagaaatagtcaaaccacgtctacaaaatgccagtatcaggcggcggcttcgaagccaaagtgatgtttggatgtaaagtgaaatattagttggcggatgaagcagatagtgaggaaa

SEQ ID NO: 71937 - DNA, 120 bp, Homo sapiens
  misc_feature: 714 for SV(C|O) and mtDNA
tttccgacggcatctacggctcaacattttttgtagccacaggcttccacggacttcacgtcattattggctcaactttcctcactatctgcttcatccgccaactaatatttcacttta

SEQ ID NO: 71938 - DNA, 120 bp, Homo sapiens
  misc_feature: 714 for SV(C|O) and mtDNA
tttcatgtggtgtatgcatcggggtagtccgagtaacgtcggggcattccggataggccgagaaagtgttgtgggaagaaagttagatttacgccgatgaatatgatagtgaaatggatt

SEQ ID NO: 71939 - DNA, 120 bp, Homo sapiens; identical to SEQ ID NO: 55141
  misc_feature: 714 for SV(C|O) and mtDNA

SEQ ID NO: 71940 - DNA, 120 bp, Homo sapiens; identical to SEQ ID NO: 53030
  misc_feature: 714 for SV(C|O) and mtDNA

SEQ ID NO: 71941 - DNA, 120 bp, Homo sapiens
  misc_feature: 714 for SV(C|O) and mtDNA
ttgcgattagaatgggtacaatgaggagtaggaggttggccatgggtatgttgttaagaagaggaattgaacctctgactgtaaagttttaagttttatgcgattaccgggctctgccat

SEQ ID NO: 71942 - DNA, 120 bp, Homo sapiens; identical to SEQ ID NO: 52934
  misc_feature: 714 for SV(C|O) and mtDNA

SEQ ID NO: 71943 - DNA, 120 bp, Homo sapiens
  misc_feature: 714 for SV(C|O) and mtDNA
ttcctccctgtacgaaaggacaagagaaataaggcctacttcacaaagcgccttcccccgtaaatgatatcatctcaacttagtattatacccacacccacccaagaacagggtttgtta

SEQ ID NO: 71944 - DNA, 120 bp, Homo sapiens
  misc_feature: 714 for SV(C|O) and mtDNA
ttccgacggcatctacggctcaacattttttgtagccacaggcttccacggacttcacgtcattattggctcaactttcctcactatctgcttcatccgccaactaatatttcactttac

SEQ ID NO: 71945 - DNA, 120 bp, Homo sapiens
  misc_feature: 714 for SV(C|O) and mtDNA
ttatccctagggtaacttgttccgttggtcaagttattggatcaattgagtatagtagttcgctttgactggtgaagtcttagcatgtactgctcggaggttgggttctgctccgaggtc

SEQ ID NO: 71946 - DNA, 120 bp, Homo sapiens
  misc_feature: 714 for SV(C|O) and mtDNA
aaaaaactccagctgacacaaaatagactacgaaagtggctttaacatatctgaacacacaatagctaagacccaaactgggattagataccccactatgcttagccctaaacctcaaca

SEQ ID NO: 71947 - DNA, 120 bp, Homo sapiens
  misc_feature: 714 for SV(C|O) and mtDNA
aaggtagcataatcacttgttccttaaatagggacctgtatgaatggctccacgagggttcagctgtctcttacttttaaccagtgaaattgacctgcccgtgaagaggcgggcatgaca

SEQ ID NO: 71948 - DNA, 120 bp, Homo sapiens
  misc_feature: 714 for SV(C|O) and mtDNA
tcttagtagctattaccttcttattatttgatctagaaattgccctccttttacccctaccatgagccctacaaacaactaacctaccactaatagttatgtcatccctcttattaatca

SEQ ID NO: 71949 - DNA, 120 bp, Homo sapiens
  misc_feature: 714 for SV(C|O) and mtDNA
ggggaagggagcctactagggtgtagaataggaagtatgtgcctgcgttcaggcgttctggctggttgcctcatcgggtgatgatagccaaggtggggataagtgtggtttcgaagaaga

SEQ ID NO: 71950 - DNA, 120 bp, Homo sapiens; identical to SEQ ID NO: 56573
  misc_feature: 714 for SV(C|O) and mtDNA

SEQ ID NO: 71951 - DNA, 120 bp, Homo sapiens
  misc_feature: 714 for SV(C|O) and mtDNA
tctagatcaaataataagaaggtaatagctactaagaagaattttatggagaaagggacgcgggcgggggatatagggtcgaagccgcactcgtaaggggtggatttttctatgtagccg

SEQ ID NO: 71952 - DNA, 120 bp, Homo sapiens
  misc_feature: 714 for SV(C|O) and mtDNA
gacctaaaatcgctcattgcatactcttcaatcagccacatagccctcgtagtaacagccattctcatccaaaccccctgaagcttcaccggcgcagtcattctcataatcgcccacgga

SEQ ID NO: 71953 - DNA, 120 bp, Homo sapiens
  misc_feature: 714 for SV(C|O) and mtDNA
gaattatttggtttcggttgttttctattagactatggtgagctcaggtgattgatactcctgatgcgagtaatacggatgtgtttaggagtgggacttctaggggatttagcggggtga

SEQ ID NO: 71954 - DNA, 120 bp, Homo sapiens
  misc_feature: 714 for SV(C|O) and mtDNA
aaatagtcaaaccacgtctacaaaatgccagtatcaggcggcggcttcgaagccaaagtgatgtttggatgtaaagtgaaatattagttggcggatgaagcagatagtgaggaaagttga

SEQ ID NO: 71955 - DNA, 120 bp, Homo sapiens; identical to SEQ ID NO: 60873
  misc_feature: 714 for SV(C|O) and mtDNA

SEQ ID NO: 71956 - DNA, 120 bp, Homo sapiens
  misc_feature: 714 for SV(C|O) and mtDNA
ggcttatgcggaggagaatgttttcatgttacttatactaacattagttcttctatagggtgatagattggtccaattgggtgtgaggagttcagttatatgtttgggattttttaggta

SEQ ID NO: 71957 - DNA, 120 bp, Homo sapiens; identical to SEQ ID NO: 54499
  misc_feature: 714 for SV(C|O) and mtDNA

SEQ ID NO: 71958 - DNA, 120 bp, Homo sapiens
  misc_feature: 714 for SV(C|O) and mtDNA
ctgatcattctatttccccctctattgatccccacctccaaatatctcatcaacaaccgactaatcaccacccaacaatgactaatcaaactaacctcaaaacaaatgataaccatacac

SEQ ID NO: 71959 - DNA, 120 bp, Homo sapiens; identical to SEQ ID NO: 58806
  misc_feature: 714 for SV(C|O) and mtDNA

SEQ ID NO: 71960 - DNA, 120 bp, Homo sapiens
  misc_feature: 714 for SV(C|O) and mtDNA
gtgcttgaattatttggtttcggttgttttctattagactatggtgagctcaggtgattgatactcctgatgcgagtaatacggatgtgtttaggagtgggacttctaggggatttagcg

SEQ ID NO: 71961 - DNA, 120 bp, Homo sapiens
  misc_feature: 714 for SV(C|O) and mtDNA
gtaaaatccattgtcgcatccacctttattatcagtctcttccccacaacaatattcatgtgcctagaccaagaagttattatctcgaactgacactgagccacaacccaaacaacccag

SEQ ID NO: 71962 - DNA, 120 bp, Homo sapiens
  misc_feature: 714 for SV(C|O) and mtDNA
gggggcatgagttagcagttcttgtgagctttctcggtaaataaggggtcgtaagcctctgttgtcagattcacaatctgatgttttggttaaactatatttacaagaggaaaacccggt

SEQ ID NO: 71963 - DNA, 120 bp, Homo sapiens
  misc_feature: 714 for SV(C|O) and mtDNA
ggagattagtatagagaggtagagtttttttcgtgatagtggttcactggataagtggcgttggcttgccatgattgtgaggggtaggagtcaggtagttagtattaggaggggggttgt

SEQ ID NO: 71964 - DNA, 120 bp, Homo sapiens
  misc_feature: 714 for SV(C|O) and mtDNA
ggaatactagtataccgctcacacctcatatcctccctactatgcctagaaggaataatactatcactgttcattatagctactctcataaccctcaacacccactccctcttagccaat

SEQ ID NO: 71965 - DNA, 120 bp, Homo sapiens
  misc_feature: 714 for SV(C|O) and mtDNA
gccttctcctatttatgggggtttagtattgattgttagcggtgtggtcgggtgtgttattattctgaattttgggggaggttatatgggtttaatagtttttttaatttatttaggggg

SEQ ID NO: 71966 - DNA, 120 bp, Homo sapiens; identical to SEQ ID NO: 56417
  misc_feature: 714 for SV(C|O) and mtDNA

SEQ ID NO: 71967 - DNA, 120 bp, Homo sapiens
  misc_feature: 714 for SV(C|O) and mtDNA
aacaacccccctcctaatactaactacctgactcctacccctcacaatcatggcaagccaacgccacttatccagtgaaccactatcacgaaaaaaactctacctctctatactaatctc

SEQ ID NO: 71968 - DNA, 120 bp, Homo sapiens; identical to SEQ ID NO: 56498
  misc_feature: 714 for SV(C|O) and mtDNA

SEQ ID NO: 71969 - DNA, 120 bp, Homo sapiens
  misc_feature: 714 for SV(C|O) and mtDNA
gaactgattaatgtttgggtctgagtttatatatcacagtgagaattctatgatggaccatgtaacgaataatgctacagggatgaatattatggagaagtagtctagtttgaagcttag

SEQ ID NO: 71970 - DNA, 120 bp, Homo sapiens
  misc_feature: 714 for SV(C|O) and mtDNA
cctggcgcaatagatatagtaccgcaagggaaagatgaaaaattataaccaagcataatacagcaaggactaacccctataccttctgcataatgaattaactagaaataactttgcaag

SEQ ID NO: 71971 - DNA, 120 bp, Homo sapiens
  misc_feature: 714 for SV(C|O) and mtDNA
ctcaccctagcattacttatatgatatgtctccatacccattacaatctccagcattccccctcaaacctaagaaatatgtctgataaaagagttactttgatagagtaaataataggag

SEQ ID NO: 71972 - DNA, 120 bp, Homo sapiens; identical to SEQ ID NO: 53609
  misc_feature: 714 for SV(C|O) and mtDNA

SEQ ID NO: 71973 - DNA, 120 bp, Homo sapiens
  misc_feature: 714 for SV(C|O) and mtDNA
ccatccaacatctccgcatgatgaaacttcggctcactccttggcgcctgcctgatcctccaaatcaccacaggactattcctagccatgcactactcaccagacgcctcaaccgccttt

SEQ ID NO: 71974 - DNA, 120 bp, Homo sapiens; identical to SEQ ID NO: 56526
  misc_feature: 714 for SV(C|O) and mtDNA

SEQ ID NO: 71975 - DNA, 120 bp, Homo sapiens; identical to SEQ ID NO: 59207
  misc_feature: 714 for SV(C|O) and mtDNA

SEQ ID NO: 71976 - DNA, 120 bp, Homo sapiens
  misc_feature: 714 for SV(C|O) and mtDNA
ataaatcttcccactattttgctacatagacgggtgtgctcttttagctgttcttaggtagctcgtctggtttcgggggtcttagctttggctctccttgcaaagttatttctagttaat

SEQ ID NO: 71977 - DNA, 120 bp, Homo sapiens; identical to SEQ ID NO: 51799
  misc_feature: 714 for SV(C|O) and mtDNA

SEQ ID NO: 71978 - DNA, 120 bp, Homo sapiens; identical to SEQ ID NO: 54874
  misc_feature: 714 for SV(C|O) and mtDNA

SEQ ID NO: 71979 - DNA, 120 bp, Homo sapiens
  misc_feature: 714 for SV(C|O) and mtDNA
aaaatgtaataattattagtagtaaggctaggagggtgttgattattaaaattaaggcgaagtttattactcttttttgaatgttgtcaaaactagttaattggaagttaacggtactat

SEQ ID NO: 71980 - DNA, 120 bp, Homo sapiens
  misc_feature: 714 for SV(C|O) and mtDNA
aagtggagtccgtaaagaggtatctttactataaaagctattgtgtaagctagtcatattaagttgttggctcaggagtttgatagttcttgggcagtgagagtgagtagtagaatgttt

SEQ ID NO: 71981 - DNA, 120 bp, Homo sapiens
  misc_feature: 713 for SV(C|O) and mtDNA
ggccccaaaaattttggtgcaactccaaataaaagtaacaaccatgcacactactataaccaccctaaccctgacttccctaattccccccatccttaccaccctcgttaaccctaacaa

SEQ ID NO: 71982 - DNA, 120 bp, Homo sapiens
  misc_feature: 713 for SV(C|O) and mtDNA
ttgggtctgagtttatatatcacagtgagaattctatgatggaccatgtaacgaataatgctacagggatgaatattatggagaagtagtctagtttgaagcttagggagagctgggttg

SEQ ID NO: 71983 - DNA, 120 bp, Homo sapiens
  misc_feature: 713 for SV(C|O) and mtDNA
ttgcctcatcgggtgatgatagccaaggtggggataagtgtggtttcgaagaagatataaaatatgattagttctgtggctgtgaatgttataattaaggagatttgtagggagattagt

SEQ ID NO: 71984 - DNA, 120 bp, Homo sapiens; identical to SEQ ID NO: 58473
  misc_feature: 713 for SV(C|O) and mtDNA

SEQ ID NO: 71985 - DNA, 120 bp, Homo sapiens
  misc_feature: 713 for SV(C|O) and mtDNA
agtaaataataggagcttaaacccccttatttctaggactatgagaatcgaacccatccctgagaatccaaaattctccgtgccacctatcacaccccatcctaaagtaaggtcagctaa

SEQ ID NO: 71986 - DNA, 120 bp, Homo sapiens
  misc_feature: 713 for SV(C|O) and mtDNA
gattaagagaaccaacacctctttacagtgaaatgccccaactaaatactaccgtatggcccaccataattacccccatactccttacactattcctcatcacccaactaaaaatattaa

SEQ ID NO: 71987 - DNA, 120 bp, Homo sapiens
  misc_feature: 713 for SV(C|O) and mtDNA
aaaaggcataattaaactttacttcctctctttcttcttcccactcatcctaaccctactcctaatcacataacctattcccccgagcaatctcaattacaatatatacaccaacaaaca

SEQ ID NO: 71988 - DNA, 120 bp, Homo sapiens
  misc_feature: 713 for SV(C|O) and mtDNA
tgtaataagcagtgcttgaattatttggtttcggttgttttctattagactatggtgagctcaggtgattgatactcctgatgcgagtaatacggatgtgtttaggagtgggacttctag

SEQ ID NO: 71989 - DNA, 120 bp, Homo sapiens
  misc_feature: 713 for SV(C|O) and mtDNA
tgggtctgagtttatatatcacagtgagaattctatgatggaccatgtaacgaataatgctacagggatgaatattatggagaagtagtctagtttgaagcttagggagagctgggttgt

SEQ ID NO: 71990 - DNA, 120 bp, Homo sapiens
  misc_feature: 713 for SV(C|O) and mtDNA
tctgataaaagagttactttgatagagtaaataataggagcttaaacccccttatttctaggactatgagaatcgaacccatccctgagaatccaaaattctccgtgccacctatcacac

SEQ ID NO: 71991 - DNA, 120 bp, Homo sapiens
  misc_feature: 713 for SV(C|O) and mtDNA
tcgtacattactgccagccaccatgaatattgtacggtaccataaatacttgaccacctgtagtacataaaaacccaatccacatcaaaaccccctccccatgcttacaagcaagtacag

SEQ ID NO: 71992 - DNA, 120 bp, Homo sapiens
  misc_feature: 713 for SV(C|O) and mtDNA
tcctctatataaatgcgtaggggttttagttaaatgtcctttgaagtatacttgaggagggtgacgggcggtgtgtacgcgcttcagggccctgttcaactaagcactctactctcagtt

SEQ ID NO: 71993 - DNA, 120 bp, Homo sapiens; identical to SEQ ID NO: 60512
  misc_feature: 713 for SV(C|O) and mtDNA

SEQ ID NO: 71994 - DNA, 120 bp, Homo sapiens
  misc_feature: 713 for SV(C|O) and mtDNA
tacgggggaaggcgctttgtgaagtaggccttatttctcttgtcctttcgtacagggaggaatttgaagtagatagaaaccgacctggattactccggtctgaactcagatcacgtagga

SEQ ID NO: 71995 - DNA, 120 bp, Homo sapiens; identical to SEQ ID NO: 55746
  misc_feature: 713 for SV(C|O) and mtDNA

SEQ ID NO: 71996 - DNA, 120 bp, Homo sapiens
  misc_feature: 713 for SV(C|O) and mtDNA
tagtagcccgtaggggcctacaacgttggggcctttgcgtagttgtatatagcctagaatttttcgttcggtaagcattaggaatgccattgcgattagaatgggtacaatgaggagtag

SEQ ID NO: 71997 - DNA, 120 bp, Homo sapiens
  misc_feature: 713 for SV(C|O) and mtDNA
taggagcttaaacccccttatttctaggactatgagaatcgaacccatccctgagaatccaaaattctccgtgccacctatcacaccccatcctaaagtaaggtcagctaaataagctat

SEQ ID NO: 71998 - DNA, 120 bp, Homo sapiens; identical to SEQ ID NO: 57302
  misc_feature: 713 for SV(C|O) and mtDNA

SEQ ID NO: 71999 - DNA, 120 bp, Homo sapiens
  misc_feature: 713 for SV(C|O) and mtDNA
ggagctttaatttattaatgcaaacagtacctaacaaacccacaggtcctaaactaccaaacctgcattaaaaatttcggttggggcgacctcggagcagaacccaacctccgagcagta

SEQ ID NO: 72000 - DNA, 120 bp, Homo sapiens
  misc_feature: 713 for SV(C|O) and mtDNA
taaaaaactccagctgacacaaaatagactacgaaagtggctttaacatatctgaacacacaatagctaagacccaaactgggattagataccccactatgcttagccctaaacctcaac

SEQ ID NO: 72001 - DNA, 120 bp, Homo sapiens
  misc_feature: 713 for SV(C|O) and mtDNA
aggtagcataatcacttgttccttaaatagggacctgtatgaatggctccacgagggttcagctgtctcttacttttaaccagtgaaattgacctgcccgtgaagaggcgggcatgacac

SEQ ID NO: 72002 - DNA, 120 bp, Homo sapiens; identical to SEQ ID NO: 56741
  misc_feature: 713 for SV(C|O) and mtDNA

SEQ ID NO: 72003 - DNA, 120 bp, Homo sapiens
  misc_feature: 713 for SV(C|O) and mtDNA
gtctgagtttatatatcacagtgagaattctatgatggaccatgtaacgaataatgctacagggatgaatattatggagaagtagtctagtttgaagcttagggagagctgggttgtttg

SEQ ID NO: 72004 - DNA, 120 bp, Homo sapiens
  misc_feature: 713 for SV(C|O) and mtDNA
ggcttagtgggcgaaatattatgctttgttgtttggatatatggaggatggggattattgctaggatgaggatggatagtaatagggcaaggacgcctcctagtttgttagggacggatc

SEQ ID NO: 72005 - DNA, 120 bp, Homo sapiens
  misc_feature: 713 for SV(C|O) and mtDNA
ggagtccgtaaagaggtatctttactataaaagctattgtgtaagctagtcatattaagttgttggctcaggagtttgatagttcttgggcagtgagagtgagtagtagaatgtttagtg

SEQ ID NO: 72006 - DNA, 120 bp, Homo sapiens; identical to SEQ ID NO: 52663
  misc_feature: 713 for SV(C|O) and mtDNA

SEQ ID NO: 72007 - DNA, 120 bp, Homo sapiens
  misc_feature: 713 for SV(C|O) and mtDNA
acgaacctgatctcttatactagtatccttaatcatttttattgccacaactaacctcctcggactcctgcctcactcatttacaccaaccacccaactatctataaacctagccatggc

SEQ ID NO: 72008 - DNA, 120 bp, Homo sapiens
  misc_feature: 713 for SV(C|O) and mtDNA
agcgatttctaggatagtcagtagaattagaattgtgaagatgataagtgtagagggaaggttaatggttgatattgctagggtggcgcttccaattaggtgcatgagtaggtggcctgc

SEQ ID NO: 72009 - DNA, 120 bp, Homo sapiens
  misc_feature: 713 for SV(C|O) and mtDNA
cttagtagctattaccttcttattatttgatctagaaattgccctccttttacccctaccatgagccctacaaacaactaacctaccactaatagttatgtcatccctcttattaatcat

SEQ ID NO: 72010 - DNA, 120 bp, Homo sapiens
  misc_feature: 713 for SV(C|O) and mtDNA
aacgaataatgctacagggatgaatattatggagaagtagtctagtttgaagcttagggagagctgggttgtttgggttgtggctcagtgtcagttcgagataataacttcttggtctag

SEQ ID NO: 72011 - DNA, 120 bp, Homo sapiens
  misc_feature: 713 for SV(C|O) and mtDNA
ctaaataaattaaaaaaactattaaacccatataacctcccccaaaattcagaataataacacacccgaccacaccgctaacaatcaatactaaacccccataaataggagaaggcttag

SEQ ID NO: 72012 - DNA, 120 bp, Homo sapiens
  misc_feature: 713 for SV(C|O) and mtDNA
actcacctgagttgtaaaaaactccagctgacacaaaatagactacgaaagtggctttaacatatctgaacacacaatagctaagacccaaactgggattagataccccactatgcttag

SEQ ID NO: 72013 - DNA, 120 bp, Homo sapiens
  misc_feature: 713 for SV(C|O) and mtDNA
aggatgaggcaggaatcaaagacagatactgcgacatagggtgctccggctccagcgtctcgcaatgctatcgcgtgcacaccccccagacgaaaataccaaatgcatggagagctcccg

SEQ ID NO: 72014 - DNA, 120 bp, Homo sapiens
  misc_feature: 713 for SV(C|O) and mtDNA
cggagcaccctatgtcgcagtatctgtctttgattcctgcctcatcctattatttatcgcacctacgttcaatattacagacgaacatacttactaaagtgtgttaattaattaatgctt

SEQ ID NO: 72015 - DNA, 120 bp, Homo sapiens
  misc_feature: 713 for SV(C|O) and mtDNA
actagacatcgtactacacgacacgtactacgttgtagctcacttccactatgtcctatcaataggagctgtatttgccatcataggaggcttcattcactgatttcccctattctcagg

SEQ ID NO: 72016 - DNA, 120 bp, Homo sapiens
  misc_feature: 713 for SV(C|O) and mtDNA
cctatcaataggagctgtatttgccatcataggaggcttcattcactgatttcccctattctcaggctacaccctagaccaaacctacgccaaaatccatttcactatcatattcatcgg

SEQ ID NO: 72017 - DNA, 120 bp, Homo sapiens
  misc_feature: 713 for SV(C|O) and mtDNA
acgaataatgctacagggatgaatattatggagaagtagtctagtttgaagcttagggagagctgggttgtttgggttgtggctcagtgtcagttcgagataataacttcttggtctagg

SEQ ID NO: 72018 - DNA, 120 bp, Homo sapiens
  misc_feature: 713 for SV(C|O) and mtDNA
cctaaaaaatcccaaacatataactgaactcctcacacccaattggaccaatctatcaccctatagaagaactaatgttagtataagtaacatgaaaacattctcctccgcataagcctg

SEQ ID NO: 72019 - DNA, 120 bp, Homo sapiens; identical to SEQ ID NO: 52903
  misc_feature: 713 for SV(C|O) and mtDNA

SEQ ID NO: 72020 - DNA, 120 bp, Homo sapiens; identical to SEQ ID NO: 57554
  misc_feature: 713 for SV(C|O) and mtDNA

SEQ ID NO: 72021 - DNA, 120 bp, Homo sapiens
  misc_feature: 713 for SV(C|O) and mtDNA
aatgtttgggtctgagtttatatatcacagtgagaattctatgatggaccatgtaacgaataatgctacagggatgaatattatggagaagtagtctagtttgaagcttagggagagctg

SEQ ID NO: 72022 - DNA, 120 bp, Homo sapiens
  misc_feature: 713 for SV(C|O) and mtDNA
caattaggagggcactggcccccaacaggcatcaccccgctaaatcccctagaagtcccactcctaaacacatccgtattactcgcatcaggagtatcaatcacctgagctcaccatagt

SEQ ID NO: 72023 - DNA, 120 bp, Homo sapiens; identical to SEQ ID NO: 61128
  misc_feature: 713 for SV(C|O) and mtDNA

SEQ ID NO: 72024 - DNA, 120 bp, Homo sapiens; identical to SEQ ID NO: 51863
  misc_feature: 713 for SV(C|O) and mtDNA

SEQ ID NO: 72025 - DNA, 120 bp, Homo sapiens
  misc_feature: 713 for SV(C|O) and mtDNA
agcagatttgggtgccacccaagtattgactcacccatcaacaaccgctatgtaattcgtacattactgccagccaccatgaatattgtacggtaccataaatacttgaccacctgtagt

SEQ ID NO: 72026 - DNA, 120 bp, Homo sapiens
  misc_feature: 713 for SV(C|O) and mtDNA
accatgtaacgaataatgctacagggatgaatattatggagaagtagtctagtttgaagcttagggagagctgggttgtttgggttgtggctcagtgtcagttcgagataataacttctt

SEQ ID NO: 72027 - DNA, 120 bp, Homo sapiens; identical to SEQ ID NO: 53881
  misc_feature: 713 for SV(C|O) and mtDNA

SEQ ID NO: 72028 - DNA, 120 bp, Homo sapiens
  misc_feature: 712 for SV(C|O) and mtDNA
ggcggtgtgtacgcgcttcagggccctgttcaactaagcactctactctcagtttactgctaaatccaccttcgacccttaagtttcataagggctatcgtagttttctggggtagaaaa

SEQ ID NO: 72029 - DNA, 120 bp, Homo sapiens
  misc_feature: 712 for SV(C|O) and mtDNA
ggcatctacggctcaacattttttgtagccacaggcttccacggacttcacgtcattattggctcaactttcctcactatctgcttcatccgccaactaatatttcactttacatccaaa

SEQ ID NO: 72030 - DNA, 120 bp, Homo sapiens
  misc_feature: 712 for SV(C|O) and mtDNA
gggagcctactagggtgtagaataggaagtatgtgcctgcgttcaggcgttctggctggttgcctcatcgggtgatgatagccaaggtggggataagtgtggtttcgaagaagatataaa

SEQ ID NO: 72031 - DNA, 120 bp, Homo sapiens; identical to SEQ ID NO: 54991
  misc_feature: 712 for SV(C|O) and mtDNA

SEQ ID NO: 72032 - DNA, 120 bp, Homo sapiens
  misc_feature: 712 for SV(C|O) and mtDNA
ctggcccccaacaggcatcaccccgctaaatcccctagaagtcccactcctaaacacatccgtattactcgcatcaggagtatcaatcacctgagctcaccatagtctaatagaaaacaa

SEQ ID NO: 72033 - DNA, 120 bp, Homo sapiens; identical to SEQ ID NO: 55880
  misc_feature: 712 for SV(C|O) and mtDNA

SEQ ID NO: 72034 - DNA, 120 bp, Homo sapiens
  misc_feature: 712 for SV(C|O) and mtDNA
ccctatagaagaactaatgttagtataagtaacatgaaaacattctcctccgcataagcctgcgtcagattaaaacactgaactgacaattaacagcccaatatctacaatcaaccaaca

SEQ ID NO: 72035 - DNA, 120 bp, Homo sapiens
  misc_feature: 712 for SV(C|O) and mtDNA
gtctgataaaagagttactttgatagagtaaataataggagcttaaacccccttatttctaggactatgagaatcgaacccatccctgagaatccaaaattctccgtgccacctatcaca

SEQ ID NO: 72036 - DNA, 120 bp, Homo sapiens
  misc_feature: 712 for SV(C|O) and mtDNA
actgatcattctatttccccctctattgatccccacctccaaatatctcatcaacaaccgactaatcaccacccaacaatgactaatcaaactaacctcaaaacaaatgataaccataca

SEQ ID NO: 72037 - DNA, 120 bp, Homo sapiens
  misc_feature: 712 for SV(C|O) and mtDNA
taggaatactagtataccgctcacacctcatatcctccctactatgcctagaaggaataatactatcactgttcattatagctactctcataaccctcaacacccactccctcttagcca

SEQ ID NO: 72038 - DNA, 120 bp, Homo sapiens; identical to SEQ ID NO: 52487
  misc_feature: 712 for SV(C|O) and mtDNA

SEQ ID NO: 72039 - DNA, 120 bp, Homo sapiens
  misc_feature: 712 for SV(C|O) and mtDNA
gcgatttctaggatagtcagtagaattagaattgtgaagatgataagtgtagagggaaggttaatggttgatattgctagggtggcgcttccaattaggtgcatgagtaggtggcctgca

SEQ ID NO: 72040 - DNA, 120 bp, Homo sapiens; identical to SEQ ID NO: 61108
  misc_feature: 712 for SV(C|O) and mtDNA

SEQ ID NO: 72041 - DNA, 120 bp, Homo sapiens
  misc_feature: 712 for SV(C|O) and mtDNA
tgaagaactgattaatgtttgggtctgagtttatatatcacagtgagaattctatgatggaccatgtaacgaataatgctacagggatgaatattatggagaagtagtctagtttgaagc

SEQ ID NO: 72042 - DNA, 120 bp, Homo sapiens; identical to SEQ ID NO: 56369
  misc_feature: 712 for SV(C|O) and mtDNA

SEQ ID NO: 72043 - DNA, 120 bp, Homo sapiens; identical to SEQ ID NO: 52459
  misc_feature: 712 for SV(C|O) and mtDNA

SEQ ID NO: 72044 - DNA, 120 bp, Homo sapiens
  misc_feature: 712 for SV(C|O) and mtDNA
atactagttattatcgaaaccatcagcctactcattcaaccaatagccctggccgtacgcctaaccgctaacattactgcaggccacctactcatgcacctaattggaagcgccacccta

SEQ ID NO: 72045 - DNA, 120 bp, Homo sapiens; identical to SEQ ID NO: 55351
  misc_feature: 712 for SV(C|O) and mtDNA

SEQ ID NO: 72046 - DNA, 120 bp, Homo sapiens
  misc_feature: 712 for SV(C|O) and mtDNA
tagacatcgtactacacgacacgtactacgttgtagctcacttccactatgtcctatcaataggagctgtatttgccatcataggaggcttcattcactgatttcccctattctcaggct

SEQ ID NO: 72047 - DNA, 120 bp, Homo sapiens
  misc_feature: 712 for SV(C|O) and mtDNA
agaactgattaatgtttgggtctgagtttatatatcacagtgagaattctatgatggaccatgtaacgaataatgctacagggatgaatattatggagaagtagtctagtttgaagctta

SEQ ID NO: 72048 - DNA, 120 bp, Homo sapiens
  misc_feature: 712 for SV(C|O) and mtDNA
gcatctacggctcaacattttttgtagccacaggcttccacggacttcacgtcattattggctcaactttcctcactatctgcttcatccgccaactaatatttcactttacatccaaac

SEQ ID NO: 72049 - DNA, 120 bp, Homo sapiens
  misc_feature: 712 for SV(C|O) and mtDNA
gttggggaacagctaaataggttgttgttgatttggttaaaaaatagtagagggatgatgctaataattaggctgtgggtggttgtgttgattcaaattatgtgttttttggaaagtcat

SEQ ID NO: 72050 - DNA, 120 bp, Homo sapiens; identical to SEQ ID NO: 53433
  misc_feature: 712 for SV(C|O) and mtDNA

SEQ ID NO: 72051 - DNA, 120 bp, Homo sapiens
  misc_feature: 712 for SV(C|O) and mtDNA
accccccaattaggagggcactggcccccaacaggcatcaccccgctaaatcccctagaagtcccactcctaaacacatccgtattactcgcatcaggagtatcaatcacctgagctcac

SEQ ID NO: 72052 - DNA, 120 bp, Homo sapiens
  misc_feature: 712 for SV(C|O) and mtDNA
gtctgtttgtcgtaggcagatggagcttgttataattatgcctcatagggatagtacaaggaaggggtaggctatgtgttttgtcagggggttgagaatgagtgtgaggcgtattatacc

SEQ ID NO: 72053 - DNA, 120 bp, Homo sapiens
  misc_feature: 712 for SV(C|O) and mtDNA
agcccatgacccctaacaggggccctctcagccctcctaatgacctccggcctagccatgtgatttcacttccactccataacgctcctcatactaggcctactaaccaacacactaacc

SEQ ID NO: 72054 - DNA, 120 bp, Homo sapiens
  misc_feature: 712 for SV(C|O) and mtDNA
gacccctaacaggggccctctcagccctcctaatgacctccggcctagccatgtgatttcacttccactccataacgctcctcatactaggcctactaaccaacacactaaccatatacc

SEQ ID NO: 72055 - DNA, 120 bp, Homo sapiens
  misc_feature: 712 for SV(C|O) and mtDNA
ataggatgaggcaggaatcaaagacagatactgcgacatagggtgctccggctccagcgtctcgcaatgctatcgcgtgcacaccccccagacgaaaataccaaatgcatggagagctcc

SEQ ID NO: 72056 - DNA, 120 bp, Homo sapiens
  misc_feature: 712 for SV(C|O) and mtDNA
gcaacttactgagggctttgaaggctcttggtctgtatttaacctaaatttctataagattattagtataaaaggggagataggtaggagtagcgtggtaagggcgatgagtgtggggag

SEQ ID NO: 72057 - DNA, 120 bp, Homo sapiens
  misc_feature: 712 for SV(C|O) and mtDNA
gagccttttaccactccagcctagcccctaccccccaattaggagggcactggcccccaacaggcatcaccccgctaaatcccctagaagtcccactcctaaacacatccgtattactcg

SEQ ID NO: 72058 - DNA, 120 bp, Homo sapiens
  misc_feature: 712 for SV(C|O) and mtDNA
atcactagacatcgtactacacgacacgtactacgttgtagctcacttccactatgtcctatcaataggagctgtatttgccatcataggaggcttcattcactgatttcccctattctc

SEQ ID NO: 72059 - DNA, 120 bp, Homo sapiens
  misc_feature: 712 for SV(C|O) and mtDNA
gacgaacctgatctcttatactagtatccttaatcatttttattgccacaactaacctcctcggactcctgcctcactcatttacaccaaccacccaactatctataaacctagccatgg

SEQ ID NO: 72060 - DNA, 120 bp, Homo sapiens
  misc_feature: 712 for SV(C|O) and mtDNA
ctggcgcaatagatatagtaccgcaagggaaagatgaaaaattataaccaagcataatacagcaaggactaacccctataccttctgcataatgaattaactagaaataactttgcaagg

SEQ ID NO: 72061 - DNA, 120 bp, Homo sapiens
  misc_feature: 712 for SV(C|O) and mtDNA
attaatgtttgggtctgagtttatatatcacagtgagaattctatgatggaccatgtaacgaataatgctacagggatgaatattatggagaagtagtctagtttgaagcttagggagag

SEQ ID NO: 72062 - DNA, 120 bp, Homo sapiens
  misc_feature: 712 for SV(C|O) and mtDNA
atgtgttggagattgagactagtagggctaggcccaccgctgcttcgcaggcggcaaagactagtatggcaataggcacaatattggctaagagggagtgggtgttgagggttatgagag

SEQ ID NO: 72063 - DNA, 120 bp, Homo sapiens
  misc_feature: 712 for SV(C|O) and mtDNA
atatgtgttggagattgagactagtagggctaggcccaccgctgcttcgcaggcggcaaagactagtatggcaataggcacaatattggctaagagggagtgggtgttgagggttatgag

SEQ ID NO: 72064 - DNA, 120 bp, Homo sapiens
  misc_feature: 712 for SV(C|O) and mtDNA
caacttactgagggctttgaaggctcttggtctgtatttaacctaaatttctataagattattagtataaaaggggagataggtaggagtagcgtggtaagggcgatgagtgtggggagg

SEQ ID NO: 72065 - DNA, 120 bp, Homo sapiens
  misc_feature: 712 for SV(C|O) and mtDNA
acatacagaaatagtcaaaccacgtctacaaaatgccagtatcaggcggcggcttcgaagccaaagtgatgtttggatgtaaagtgaaatattagttggcggatgaagcagatagtgagg

SEQ ID NO: 72066 - DNA, 120 bp, Homo sapiens
  misc_feature: 712 for SV(C|O) and mtDNA
agtagcccgtaggggcctacaacgttggggcctttgcgtagttgtatatagcctagaatttttcgttcggtaagcattaggaatgccattgcgattagaatgggtacaatgaggagtagg

SEQ ID NO: 72067 - DNA, 120 bp, Homo sapiens; identical to SEQ ID NO: 61267
  misc_feature: 712 for SV(C|O) and mtDNA

SEQ ID NO: 72068 - DNA, 120 bp, Homo sapiens; identical to SEQ ID NO: 53005
  misc_feature: 712 for SV(C|O) and mtDNA

SEQ ID NO: 72069 - DNA, 120 bp, Homo sapiens; identical to SEQ ID NO: 58493
  misc_feature: 711 for SV(C|O) and mtDNA

SEQ ID NO: 72070 - DNA, 120 bp, Homo sapiens
  misc_feature: 711 for SV(C|O) and mtDNA
cggcatctacggctcaacattttttgtagccacaggcttccacggacttcacgtcattattggctcaactttcctcactatctgcttcatccgccaactaatatttcactttacatccaa

SEQ ID NO: 72071 - DNA, 120 bp, Homo sapiens
  misc_feature: 711 for SV(C|O) and mtDNA
cttctcctatttatgggggtttagtattgattgttagcggtgtggtcgggtgtgttattattctgaattttgggggaggttatatgggtttaatagtttttttaatttatttagggggaa

SEQ ID NO: 72072 - DNA, 120 bp, Homo sapiens
  misc_feature: 711 for SV(C|O) and mtDNA
ccgcagtactgatcattctatttccccctctattgatccccacctccaaatatctcatcaacaaccgactaatcaccacccaacaatgactaatcaaactaacctcaaaacaaatgataa

SEQ ID NO: 72073 - DNA, 120 bp, Homo sapiens
  misc_feature: 711 for SV(C|O) and mtDNA
agggagcctactagggtgtagaataggaagtatgtgcctgcgttcaggcgttctggctggttgcctcatcgggtgatgatagccaaggtggggataagtgtggtttcgaagaagatataa

SEQ ID NO: 72074 - DNA, 120 bp, Homo sapiens
  misc_feature: 711 for SV(C|O) and mtDNA
ttaggtctgtttgtcgtaggcagatggagcttgttataattatgcctcatagggatagtacaaggaaggggtaggctatgtgttttgtcagggggttgagaatgagtgtgaggcgtatta

SEQ ID NO: 72075 - DNA, 120 bp, Homo sapiens
  misc_feature: 711 for SV(C|O) and mtDNA
tgtggtgatttggaggatcaggcaggcgccaaggagtgagccgaagtttcatcatgcggagatgttggatggggtggggaggtcgatgaatgagtggttaattaattttattagggggtt

SEQ ID NO: 72076 - DNA, 120 bp, Homo sapiens; identical to SEQ ID NO: 59161
  misc_feature: 711 for SV(C|O) and mtDNA

SEQ ID NO: 72077 - DNA, 120 bp, Homo sapiens
  misc_feature: 711 for SV(C|O) and mtDNA
tctgtttgtcgtaggcagatggagcttgttataattatgcctcatagggatagtacaaggaaggggtaggctatgtgttttgtcagggggttgagaatgagtgtgaggcgtattatacca

SEQ ID NO: 72078 - DNA, 120 bp, Homo sapiens; identical to SEQ ID NO: 56119
  misc_feature: 711 for SV(C|O) and mtDNA

SEQ ID NO: 72079 - DNA, 120 bp, Homo sapiens; identical to SEQ ID NO: 54284
  misc_feature: 711 for SV(C|O) and mtDNA

SEQ ID NO: 72080 - DNA, 120 bp, Homo sapiens
  misc_feature: 711 for SV(C|O) and mtDNA
ccacaaagacattggaacactatacctattattcggcgcatgagctggagtcctaggcacagctctaagcctccttattcgagccgagctgggccagccaggcaaccttctaggtaacga

SEQ ID NO: 72081 - DNA, 120 bp, Homo sapiens; identical to SEQ ID NO: 51881
  misc_feature: 711 for SV(C|O) and mtDNA

SEQ ID NO: 72082 - DNA, 120 bp, Homo sapiens; identical to SEQ ID NO: 58455
  misc_feature: 711 for SV(C|O) and mtDNA

SEQ ID NO: 72083 - DNA, 120 bp, Homo sapiens; identical to SEQ ID NO: 56866
  misc_feature: 711 for SV(C|O) and mtDNA

SEQ ID NO: 72084 - DNA, 120 bp, Homo sapiens; identical to SEQ ID NO: 52447
  misc_feature: 711 for SV(C|O) and mtDNA

SEQ ID NO: 72085 - DNA, 120 bp, Homo sapiens
  misc_feature: 711 for SV(C|O) and mtDNA
agctaaataggttgttgttgatttggttaaaaaatagtagagggatgatgctaataattaggctgtgggtggttgtgttgattcaaattatgtgttttttggaaagtcatgtcagtggta

SEQ ID NO: 72086 - DNA, 120 bp, Homo sapiens
  misc_feature: 711 for SV(C|O) and mtDNA
taacaacccccctcctaatactaactacctgactcctacccctcacaatcatggcaagccaacgccacttatccagtgaaccactatcacgaaaaaaactctacctctctatactaatct

SEQ ID NO: 72087 - DNA, 120 bp, Homo sapiens
  misc_feature: 711 for SV(C|O) and mtDNA
aaaaaggcataattaaactttacttcctctctttcttcttcccactcatcctaaccctactcctaatcacataacctattcccccgagcaatctcaattacaatatatacaccaacaaac

SEQ ID NO: 72088 - DNA, 120 bp, Homo sapiens
  misc_feature: 711 for SV(C|O) and mtDNA
accatttccgacggcatctacggctcaacattttttgtagccacaggcttccacggacttcacgtcattattggctcaactttcctcactatctgcttcatccgccaactaatatttcac

SEQ ID NO: 72089 - DNA, 120 bp, Homo sapiens; identical to SEQ ID NO: 61481
  misc_feature: 711 for SV(C|O) and mtDNA

SEQ ID NO: 72090 - DNA, 120 bp, Homo sapiens; identical to SEQ ID NO: 57904
  misc_feature: 711 for SV(C|O) and mtDNA

SEQ ID NO: 72091 - DNA, 120 bp, Homo sapiens; identical to SEQ ID NO: 54889
  misc_feature: 711 for SV(C|O) and mtDNA

SEQ ID NO: 72092 - DNA, 120 bp, Homo sapiens; identical to SEQ ID NO: 60238
  misc_feature: 711 for SV(C|O) and mtDNA

SEQ ID NO: 72093 - DNA, 120 bp, Homo sapiens
  misc_feature: 711 for SV(C|O) and mtDNA
ctatcaataggagctgtatttgccatcataggaggcttcattcactgatttcccctattctcaggctacaccctagaccaaacctacgccaaaatccatttcactatcatattcatcggc

SEQ ID NO: 72094 - DNA, 120 bp, Homo sapiens
  misc_feature: 711 for SV(C|O) and mtDNA
agaagatataaaatatgattagttctgtggctgtgaatgttataattaaggagatttgtagggagattagtatagagaggtagagtttttttcgtgatagtggttcactggataagtggc

SEQ ID NO: 72095 - DNA, 120 bp, Homo sapiens
  misc_feature: 711 for SV(C|O) and mtDNA
ctatgtcgcagtatctgtctttgattcctgcctcatcctattatttatcgcacctacgttcaatattacagacgaacatacttactaaagtgtgttaattaattaatgcttgtaggacat

SEQ ID NO: 72096 - DNA, 120 bp, Homo sapiens
  misc_feature: 711 for SV(C|O) and mtDNA
cctactagggtgtagaataggaagtatgtgcctgcgttcaggcgttctggctggttgcctcatcgggtgatgatagccaaggtggggataagtgtggtttcgaagaagatataaaatatg

SEQ ID NO: 72097 - DNA, 120 bp, Homo sapiens; identical to SEQ ID NO: 59415
  misc_feature: 711 for SV(C|O) and mtDNA

SEQ ID NO: 72098 - DNA, 120 bp, Homo sapiens
  misc_feature: 711 for SV(C|O) and mtDNA
ccatatgtgttggagattgagactagtagggctaggcccaccgctgcttcgcaggcggcaaagactagtatggcaataggcacaatattggctaagagggagtgggtgttgagggttatg

SEQ ID NO: 72099 - DNA, 120 bp, Homo sapiens
  misc_feature: 711 for SV(C|O) and mtDNA
cattatcgaagaattcacaaaaaacaatagcctcatcatccccaccatcatagccaccatcaccctccttaacctctacttctacctacgcctaatctactccacctcaatcacactact

SEQ ID NO: 72100 - DNA, 120 bp, Homo sapiens
  misc_feature: 711 for SV(C|O) and mtDNA
agccggagcaccctatgtcgcagtatctgtctttgattcctgcctcatcctattatttatcgcacctacgttcaatattacagacgaacatacttactaaagtgtgttaattaattaatg

SEQ ID NO: 72101 - DNA, 120 bp, Homo sapiens
  misc_feature: 711 for SV(C|O) and mtDNA
attgcgagacgctggagccggagcaccctatgtcgcagtatctgtctttgattcctgcctcatcctattatttatcgcacctacgttcaatattacagacgaacatacttactaaagtgt

SEQ ID NO: 72102 - DNA, 120 bp, Homo sapiens
  misc_feature: 711 for SV(C|O) and mtDNA
attcctccctgtacgaaaggacaagagaaataaggcctacttcacaaagcgccttcccccgtaaatgatatcatctcaacttagtattatacccacacccacccaagaacagggtttgtt

SEQ ID NO: 72103 - DNA, 120 bp, Homo sapiens
  misc_feature: 711 for SV(C|O) and mtDNA
atgtaacgaataatgctacagggatgaatattatggagaagtagtctagtttgaagcttagggagagctgggttgtttgggttgtggctcagtgtcagttcgagataataacttcttggt

SEQ ID NO: 72104 - DNA, 120 bp, Homo sapiens
  misc_feature: 711 for SV(C|O) and mtDNA
aggccatatgtgttggagattgagactagtagggctaggcccaccgctgcttcgcaggcggcaaagactagtatggcaataggcacaatattggctaagagggagtgggtgttgagggtt

SEQ ID NO: 72105 - DNA, 120 bp, Homo sapiens
  misc_feature: 710 for SV(C|O) and mtDNA
ttgctaggatgaggatggatagtaatagggcaaggacgcctcctagtttgttagggacggatcggagaattgtgtaggcgaataggaaatatcattcgggcttgatgtggggaggggtgt

SEQ ID NO: 72106 - DNA, 120 bp, Homo sapiens
  misc_feature: 710 for SV(C|O) and mtDNA
ttgcgagacgctggagccggagcaccctatgtcgcagtatctgtctttgattcctgcctcatcctattatttatcgcacctacgttcaatattacagacgaacatacttactaaagtgtg

SEQ ID NO: 72107 - DNA, 120 bp, Homo sapiens; identical to SEQ ID NO: 53364
  misc_feature: 710 for SV(C|O) and mtDNA

SEQ ID NO: 72108 - DNA, 120 bp, Homo sapiens
  misc_feature: 710 for SV(C|O) and mtDNA
ttcgtacattactgccagccaccatgaatattgtacggtaccataaatacttgaccacctgtagtacataaaaacccaatccacatcaaaaccccctccccatgcttacaagcaagtaca

SEQ ID NO: 72109 - DNA, 120 bp, Homo sapiens
  misc_feature: 710 for SV(C|O) and mtDNA
cgaaaagtcctaatagtagaagaaccctccataaacctggagtgactatatggatgccccccaccctaccacacattcgaagaacccgtatacataaaatctagacaaaaaaggaaggaa

SEQ ID NO: 72110 - DNA, 120 bp, Homo sapiens; identical to SEQ ID NO: 58048
  misc_feature: 710 for SV(C|O) and mtDNA

SEQ ID NO: 72111 - DNA, 120 bp, Homo sapiens; identical to SEQ ID NO: 52484
  misc_feature: 710 for SV(C|O) and mtDNA

SEQ ID NO: 72112 - DNA, 120 bp, Homo sapiens
  misc_feature: 710 for SV(C|O) and mtDNA
tgtttgggtctgagtttatatatcacagtgagaattctatgatggaccatgtaacgaataatgctacagggatgaatattatggagaagtagtctagtttgaagcttagggagagctggg

SEQ ID NO: 72113 - DNA, 120 bp, Homo sapiens
  misc_feature: 710 for SV(C|O) and mtDNA
cagaagcttatgttgtttatgcggggaaacgccatatcgggggcaccgattattaggggaactagtcagttgccaaagcctccgattatgatgggtattactatgaagaagattattaca

SEQ ID NO: 72114 - DNA, 120 bp, Homo sapiens; identical to SEQ ID NO: 52365
  misc_feature: 710 for SV(C|O) and mtDNA

SEQ ID NO: 72115 - DNA, 120 bp, Homo sapiens
  misc_feature: 710 for SV(C|O) and mtDNA
tgattatgggcgttgattagtagtagttactggttgaacattgtttgttggtgtatatattgtaattgagattgctcgggggaataggttatgtgattaggagtagggttaggatgagtg

SEQ ID NO: 72116 - DNA, 120 bp, Homo sapiens; identical to SEQ ID NO: 61024
  misc_feature: 710 for SV(C|O) and mtDNA

SEQ ID NO: 72117 - DNA, 120 bp, Homo sapiens
  misc_feature: 710 for SV(C|O) and mtDNA
tctgagtttatatatcacagtgagaattctatgatggaccatgtaacgaataatgctacagggatgaatattatggagaagtagtctagtttgaagcttagggagagctgggttgtttgg

SEQ ID NO: 72118 - DNA, 120 bp, Homo sapiens; identical to SEQ ID NO: 60772
  misc_feature: 710 for SV(C|O) and mtDNA

SEQ ID NO: 72119 - DNA, 120 bp, Homo sapiens; identical to SEQ ID NO: 54998
  misc_feature: 710 for SV(C|O) and mtDNA

SEQ ID NO: 72120 - DNA, 120 bp, Homo sapiens
  misc_feature: 710 for SV(C|O) and mtDNA
aggagaatgttttcatgttacttatactaacattagttcttctatagggtgatagattggtccaattgggtgtgaggagttcagttatatgtttgggattttttaggtagtgggtgttga

SEQ ID NO: 72121 - DNA, 120 bp, Homo sapiens
  misc_feature: 710 for SV(C|O) and mtDNA
agcctactagggtgtagaataggaagtatgtgcctgcgttcaggcgttctggctggttgcctcatcgggtgatgatagccaaggtggggataagtgtggtttcgaagaagatataaaata

SEQ ID NO: 72122 - DNA, 120 bp, Homo sapiens
  misc_feature: 710 for SV(C|O) and mtDNA
atgacccctaacaggggccctctcagccctcctaatgacctccggcctagccatgtgatttcacttccactccataacgctcctcatactaggcctactaaccaacacactaaccatata

SEQ ID NO: 72123 - DNA, 120 bp, Homo sapiens; identical to SEQ ID NO: 54123
  misc_feature: 710 for SV(C|O) and mtDNA

SEQ ID NO: 72124 - DNA, 120 bp, Homo sapiens
  misc_feature: 710 for SV(C|O) and mtDNA
taggtctgtttgtcgtaggcagatggagcttgttataattatgcctcatagggatagtacaaggaaggggtaggctatgtgttttgtcagggggttgagaatgagtgtgaggcgtattat

SEQ ID NO: 72125 - DNA, 120 bp, Homo sapiens
  misc_feature: 710 for SV(C|O) and mtDNA
cctgagttgtaaaaaactccagctgacacaaaatagactacgaaagtggctttaacatatctgaacacacaatagctaagacccaaactgggattagataccccactatgcttagcccta

SEQ ID NO: 72126 - DNA, 120 bp, Homo sapiens
  misc_feature: 710 for SV(C|O) and mtDNA
tagggataacagcgcaatcctattctagagtccatatcaacaatagggtttacgacctcgatgttggatcaggacatcccgatggtgcagccgctattaaaggttcgtttgttcaacgat

SEQ ID NO: 72127 - DNA, 120 bp, Homo sapiens
  misc_feature: 710 for SV(C|O) and mtDNA
tactagttattatcgaaaccatcagcctactcattcaaccaatagccctggccgtacgcctaaccgctaacattactgcaggccacctactcatgcacctaattggaagcgccaccctag

SEQ ID NO: 72128 - DNA, 120 bp, Homo sapiens
  misc_feature: 710 for SV(C|O) and mtDNA
ccctaccacacattcgaagaacccgtatacataaaatctagacaaaaaaggaaggaatcgaaccccccaaagctggtttcaagccaaccccatggcctccatgactttttcaaaaaggta

SEQ ID NO: 72129 - DNA, 120 bp, Homo sapiens
  misc_feature: 710 for SV(C|O) and mtDNA
caaaccacaaagacattggaacactatacctattattcggcgcatgagctggagtcctaggcacagctctaagcctccttattcgagccgagctgggccagccaggcaaccttctaggta

SEQ ID NO: 72130 - DNA, 120 bp, Homo sapiens; identical to SEQ ID NO: 55353
  misc_feature: 710 for SV(C|O) and mtDNA

SEQ ID NO: 72131 - DNA, 120 bp, Homo sapiens
  misc_feature: 710 for SV(C|O) and mtDNA
acgctggagccggagcaccctatgtcgcagtatctgtctttgattcctgcctcatcctattatttatcgcacctacgttcaatattacagacgaacatacttactaaagtgtgttaatta

SEQ ID NO: 72132 - DNA, 120 bp, Homo sapiens
  misc_feature: 710 for SV(C|O) and mtDNA
agtggagtccgtaaagaggtatctttactataaaagctattgtgtaagctagtcatattaagttgttggctcaggagtttgatagttcttgggcagtgagagtgagtagtagaatgttta

SEQ ID NO: 72133 - DNA, 120 bp, Homo sapiens; identical to SEQ ID NO: 52133
  misc_feature: 710 for SV(C|O) and mtDNA

SEQ ID NO: 72134 - DNA, 120 bp, Homo sapiens
  misc_feature: 710 for SV(C|O) and mtDNA
gtaacgaataatgctacagggatgaatattatggagaagtagtctagtttgaagcttagggagagctgggttgtttgggttgtggctcagtgtcagttcgagataataacttcttggtct

SEQ ID NO: 72135 - DNA, 120 bp, Homo sapiens
  misc_feature: 710 for SV(C|O) and mtDNA
gcttagtgggcgaaatattatgctttgttgtttggatatatggaggatggggattattgctaggatgaggatggatagtaatagggcaaggacgcctcctagtttgttagggacggatcg

SEQ ID NO: 72136 - DNA, 120 bp, Homo sapiens
  misc_feature: 710 for SV(C|O) and mtDNA
agccttttaccactccagcctagcccctaccccccaattaggagggcactggcccccaacaggcatcaccccgctaaatcccctagaagtcccactcctaaacacatccgtattactcgc

SEQ ID NO: 72137 - DNA, 120 bp, Homo sapiens
  misc_feature: 710 for SV(C|O) and mtDNA
gccatatgtgttggagattgagactagtagggctaggcccaccgctgcttcgcaggcggcaaagactagtatggcaataggcacaatattggctaagagggagtgggtgttgagggttat

SEQ ID NO: 72138 - DNA, 120 bp, Homo sapiens; identical to SEQ ID NO: 60362
  misc_feature: 710 for SV(C|O) and mtDNA

SEQ ID NO: 72139 - DNA, 120 bp, Homo sapiens
  misc_feature: 710 for SV(C|O) and mtDNA
attctaccctaccatcacacaccgcacaatcccctatctaggccttcttacgagccaaaacctgcccctactcctcctagacctaacctgactagaaaagctattacctaaaacaatttc

SEQ ID NO: 72140 - DNA, 120 bp, Homo sapiens
  misc_feature: 710 for SV(C|O) and mtDNA
gaaatagtcaaaccacgtctacaaaatgccagtatcaggcggcggcttcgaagccaaagtgatgtttggatgtaaagtgaaatattagttggcggatgaagcagatagtgaggaaagttg

SEQ ID NO: 72141 - DNA, 120 bp, Homo sapiens; identical to SEQ ID NO: 61662
  misc_feature: 710 for SV(C|O) and mtDNA

SEQ ID NO: 72142 - DNA, 120 bp, Homo sapiens
  misc_feature: 710 for SV(C|O) and mtDNA
accacaaagacattggaacactatacctattattcggcgcatgagctggagtcctaggcacagctctaagcctccttattcgagccgagctgggccagccaggcaaccttctaggtaacg

SEQ ID NO: 72143 - DNA, 120 bp, Homo sapiens; identical to SEQ ID NO: 58514
  misc_feature: 710 for SV(C|O) and mtDNA

SEQ ID NO: 72144 - DNA, 120 bp, Homo sapiens; identical to SEQ ID NO: 59833
  misc_feature: 710 for SV(C|O) and mtDNA

SEQ ID NO: 72145 - DNA, 120 bp, Homo sapiens
  misc_feature: 710 for SV(C|O) and mtDNA
agtttatatatcacagtgagaattctatgatggaccatgtaacgaataatgctacagggatgaatattatggagaagtagtctagtttgaagcttagggagagctgggttgtttgggttg

SEQ ID NO: 72146 - DNA, 120 bp, Homo sapiens; identical to SEQ ID NO: 61873
  misc_feature: 710 for SV(C|O) and mtDNA

SEQ ID NO: 72147 - DNA, 120 bp, Homo sapiens
  misc_feature: 710 for SV(C|O) and mtDNA
agtcagaagcttatgttgtttatgcggggaaacgccatatcgggggcaccgattattaggggaactagtcagttgccaaagcctccgattatgatgggtattactatgaagaagattatt

SEQ ID NO: 72148 - DNA, 120 bp, Homo sapiens
  misc_feature: 710 for SV(C|O) and mtDNA
aagtactattgacccagcgatgggggcttcgacatgggctttagggagtcataagtggagtccgtaaagaggtatctttactataaaagctattgtgtaagctagtcatattaagttgtt

SEQ ID NO: 72149 - DNA, 120 bp, Homo sapiens
  misc_feature: 710 for SV(C|O) and mtDNA
aagaactgattaatgtttgggtctgagtttatatatcacagtgagaattctatgatggaccatgtaacgaataatgctacagggatgaatattatggagaagtagtctagtttgaagctt

SEQ ID NO: 72150 - DNA, 120 bp, Homo sapiens
  misc_feature: 709 for SV(C|O) and mtDNA
ttttctagtcaggttaggtctaggaggagtaggggcaggttttggctcgtaagaaggcctagataggggattgtgcggtgtgtgatggtagggtagaatccgagtatgttggagaaataa

SEQ ID NO: 72151 - DNA, 120 bp, Homo sapiens
  misc_feature: 709 for SV(C|O) and mtDNA
ttgtatgattatgggcgttgattagtagtagttactggttgaacattgtttgttggtgtatatattgtaattgagattgctcgggggaataggttatgtgattaggagtagggttaggat

SEQ ID NO: 72152 - DNA, 120 bp, Homo sapiens
  misc_feature: 709 for SV(C|O) and mtDNA
taaattagaatcttagctttgggtgctaatggtggagttaaagactttttctctgatttgtccttggaaaaaggttttcatctccggtttacaagactggtgtattagtttatactacaa

SEQ ID NO: 72153 - DNA, 120 bp, Homo sapiens
  misc_feature: 709 for SV(C|O) and mtDNA
ttagtgggcgaaatattatgctttgttgtttggatatatggaggatggggattattgctaggatgaggatggatagtaatagggcaaggacgcctcctagtttgttagggacggatcgga

SEQ ID NO: 72154 - DNA, 120 bp, Homo sapiens; identical to SEQ ID NO: 55457
  misc_feature: 709 for SV(C|O) and mtDNA

SEQ ID NO: 72155 - DNA, 120 bp, Homo sapiens
  misc_feature: 709 for SV(C|O) and mtDNA
ggataacagcgcaatcctattctagagtccatatcaacaatagggtttacgacctcgatgttggatcaggacatcccgatggtgcagccgctattaaaggttcgtttgttcaacgattaa

SEQ ID NO: 72156 - DNA, 120 bp, Homo sapiens
  misc_feature: 709 for SV(C|O) and mtDNA
ggtgggcctagccctactagtctcaatctccaacacatatggcctagactacgtacataacctaaacctactccaatgctaaaactaatcgtcccaacaattatattactaccactgaca

SEQ ID NO: 72157 - DNA, 120 bp, Homo sapiens
  misc_feature: 709 for SV(C|O) and mtDNA
tggagtccgtaaagaggtatctttactataaaagctattgtgtaagctagtcatattaagttgttggctcaggagtttgatagttcttgggcagtgagagtgagtagtagaatgtttagt

SEQ ID NO: 72158 - DNA, 120 bp, Homo sapiens; identical to SEQ ID NO: 56339
  misc_feature: 709 for SV(C|O) and mtDNA

SEQ ID NO: 72159 - DNA, 120 bp, Homo sapiens; identical to SEQ ID NO: 57171
  misc_feature: 709 for SV(C|O) and mtDNA

SEQ ID NO: 72160 - DNA, 120 bp, Homo sapiens
  misc_feature: 709 for SV(C|O) and mtDNA
tcctgtggtgatttggaggatcaggcaggcgccaaggagtgagccgaagtttcatcatgcggagatgttggatggggtggggaggtcgatgaatgagtggttaattaattttattagggg

SEQ ID NO: 72161 - DNA, 120 bp, Homo sapiens
  misc_feature: 709 for SV(C|O) and mtDNA
tcctagtgggtgaggggtggctttggagttgcagttgatgtgtgatagttgagggttgattgctgtacttgcttgtaagcatggggagggggttttgatgtggattgggtttttatgtac

SEQ ID NO: 72162 - DNA, 120 bp, Homo sapiens; identical to SEQ ID NO: 55153
  misc_feature: 709 for SV(C|O) and mtDNA

SEQ ID NO: 72163 - DNA, 120 bp, Homo sapiens; identical to SEQ ID NO: 55860
  misc_feature: 709 for SV(C|O) and mtDNA

SEQ ID NO: 72164 - DNA, 120 bp, Homo sapiens
  misc_feature: 709 for SV(C|O) and mtDNA
tcaatcacactactccccatatctaacaacgtaaaaataaaatgacagtttgaacatacaaaacccaccccattcctccccacactcatcgcccttaccacgctactcctacctatctcc

SEQ ID NO: 72165 - DNA, 120 bp, Homo sapiens
  misc_feature: 709 for SV(C|O) and mtDNA
tcaaaatgtaataattattagtagtaaggctaggagggtgttgattattaaaattaaggcgaagtttattactcttttttgaatgttgtcaaaactagttaattggaagttaacggtact

SEQ ID NO: 72166 - DNA, 120 bp, Homo sapiens; identical to SEQ ID NO: 61756
  misc_feature: 709 for SV(C|O) and mtDNA

SEQ ID NO: 72167 - DNA, 120 bp, Homo sapiens; identical to SEQ ID NO: 56668
  misc_feature: 709 for SV(C|O) and mtDNA

SEQ ID NO: 72168 - DNA, 120 bp, Homo sapiens; identical to SEQ ID NO: 53784
  misc_feature: 709 for SV(C|O) and mtDNA

SEQ ID NO: 72169 - DNA, 120 bp, Homo sapiens; identical to SEQ ID NO: 54619
  misc_feature: 709 for SV(C|O) and mtDNA

SEQ ID NO: 72170 - DNA, 120 bp, Homo sapiens
  misc_feature: 709 for SV(C|O) and mtDNA
tagcccacttcttaccacaaggcacacctacaccccttatccccatactagttattatcgaaaccatcagcctactcattcaaccaatagccctggccgtacgcctaaccgctaacatta

SEQ ID NO: 72171 - DNA, 120 bp, Homo sapiens; identical to SEQ ID NO: 52463
  misc_feature: 709 for SV(C|O) and mtDNA

SEQ ID NO: 72172 - DNA, 120 bp, Homo sapiens
  misc_feature: 709 for SV(C|O) and mtDNA
gttgttaagaagaggaattgaacctctgactgtaaagttttaagttttatgcgattaccgggctctgccatcttaacaaaccctgttcttgggtgggtgtgggtataatactaagttgag

SEQ ID NO: 72173 - DNA, 120 bp, Homo sapiens
  misc_feature: 709 for SV(C|O) and mtDNA
ccctcgttccacagaagctgccatcaagtatttcctcacgcaagcaaccgcatccataatccttctaatagctatcctcttcaacaatatactctccggacaatgaaccataaccaatac

SEQ ID NO: 72174 - DNA, 120 bp, Homo sapiens
  misc_feature: 709 for SV(C|O) and mtDNA
gtaataagcagtgcttgaattatttggtttcggttgttttctattagactatggtgagctcaggtgattgatactcctgatgcgagtaatacggatgtgtttaggagtgggacttctagg

SEQ ID NO: 72175 - DNA, 120 bp, Homo sapiens
  misc_feature: 709 for SV(C|O) and mtDNA
cacctacaccccttatccccatactagttattatcgaaaccatcagcctactcattcaaccaatagccctggccgtacgcctaaccgctaacattactgcaggccacctactcatgcacc

SEQ ID NO: 72176 - DNA, 120 bp, Homo sapiens
  misc_feature: 709 for SV(C|O) and mtDNA
ggtattaggattaggattgttgtgaagtatagtacggatgctacttgtccaatgatggtaaaagggtagcttactggttgtcctccgattcaggttagaatgaggaggtctgcggctagg

SEQ ID NO: 72177 - DNA, 120 bp, Homo sapiens
  misc_feature: 709 for SV(C|O) and mtDNA
ggcctacaacgttggggcctttgcgtagttgtatatagcctagaatttttcgttcggtaagcattaggaatgccattgcgattagaatgggtacaatgaggagtaggaggttggccatgg

SEQ ID NO: 72178 - DNA, 120 bp, Homo sapiens; identical to SEQ ID NO: 53837
  misc_feature: 709 for SV(C|O) and mtDNA

SEQ ID NO: 72179 - DNA, 120 bp, Homo sapiens
  misc_feature: 709 for SV(C|O) and mtDNA
caccccatccaacatctccgcatgatgaaacttcggctcactccttggcgcctgcctgatcctccaaatcaccacaggactattcctagccatgcactactcaccagacgcctcaaccgc

SEQ ID NO: 72180 - DNA, 120 bp, Homo sapiens
  misc_feature: 709 for SV(C|O) and mtDNA
gcctacaacgttggggcctttgcgtagttgtatatagcctagaatttttcgttcggtaagcattaggaatgccattgcgattagaatgggtacaatgaggagtaggaggttggccatggg

SEQ ID NO: 72181 - DNA, 120 bp, Homo sapiens; identical to SEQ ID NO: 60904
  misc_feature: 709 for SV(C|O) and mtDNA

SEQ ID NO: 72182 - DNA, 120 bp, Homo sapiens
  misc_feature: 709 for SV(C|O) and mtDNA
caaccttagccaaaccatttacccaaataaagtataggcgatagaaattgaaacctggcgcaatagatatagtaccgcaagggaaagatgaaaaattataaccaagcataatacagcaag

SEQ ID NO: 72183 - DNA, 120 bp, Homo sapiens
  misc_feature: 709 for SV(C|O) and mtDNA
cttgaattatttggtttcggttgttttctattagactatggtgagctcaggtgattgatactcctgatgcgagtaatacggatgtgtttaggagtgggacttctaggggatttagcgggg

SEQ ID NO: 72184 - DNA, 120 bp, Homo sapiens
  misc_feature: 709 for SV(C|O) and mtDNA
ctcctctatataaatgcgtaggggttttagttaaatgtcctttgaagtatacttgaggagggtgacgggcggtgtgtacgcgcttcagggccctgttcaactaagcactctactctcagt

SEQ ID NO: 72185 - DNA, 120 bp, Homo sapiens
  misc_feature: 709 for SV(C|O) and mtDNA
cctagggataacagcgcaatcctattctagagtccatatcaacaatagggtttacgacctcgatgttggatcaggacatcccgatggtgcagccgctattaaaggttcgtttgttcaacg

SEQ ID NO: 72186 - DNA, 120 bp, Homo sapiens
  misc_feature: 709 for SV(C|O) and mtDNA
cctatttatgggggtttagtattgattgttagcggtgtggtcgggtgtgttattattctgaattttgggggaggttatatgggtttaatagtttttttaatttatttagggggaatgatg

SEQ ID NO: 72187 - DNA, 120 bp, Homo sapiens
  misc_feature: 709 for SV(C|O) and mtDNA
ccggagcaccctatgtcgcagtatctgtctttgattcctgcctcatcctattatttatcgcacctacgttcaatattacagacgaacatacttactaaagtgtgttaattaattaatgct

SEQ ID NO: 72188 - DNA, 120 bp, Homo sapiens
  misc_feature: 709 for SV(C|O) and mtDNA
cagaaatagtcaaaccacgtctacaaaatgccagtatcaggcggcggcttcgaagccaaagtgatgtttggatgtaaagtgaaatattagttggcggatgaagcagatagtgaggaaagt

SEQ ID NO: 72189 - DNA, 120 bp, Homo sapiens
  misc_feature: 709 for SV(C|O) and mtDNA
agtactgatcattctatttccccctctattgatccccacctccaaatatctcatcaacaaccgactaatcaccacccaacaatgactaatcaaactaacctcaaaacaaatgataaccat

SEQ ID NO: 72190 - DNA, 120 bp, Homo sapiens
  misc_feature: 709 for SV(C|O) and mtDNA
atgccgtcggaaatggtgaagggagactcgaagtactctgaggcttgtaggagggtaaaatagagacccagtaaaattgtaataagcagtgcttgaattatttggtttcggttgttttct

SEQ ID NO: 72191 - DNA, 120 bp, Homo sapiens
  misc_feature: 709 for SV(C|O) and mtDNA
atgagttagcagttcttgtgagctttctcggtaaataaggggtcgtaagcctctgttgtcagattcacaatctgatgttttggttaaactatatttacaagaggaaaacccggtaatgat

SEQ ID NO: 72192 - DNA, 120 bp, Homo sapiens
  misc_feature: 709 for SV(C|O) and mtDNA
atatgtctgataaaagagttactttgatagagtaaataataggagcttaaacccccttatttctaggactatgagaatcgaacccatccctgagaatccaaaattctccgtgccacctat

SEQ ID NO: 72193 - DNA, 120 bp, Homo sapiens
  misc_feature: 709 for SV(C|O) and mtDNA
aagccgcactcgtaaggggtggatttttctatgtagccgttgagttgtggtagtcaaaatgtaataattattagtagtaaggctaggagggtgttgattattaaaattaaggcgaagttt

SEQ ID NO: 72194 - DNA, 120 bp, Homo sapiens; identical to SEQ ID NO: 58973
  misc_feature: 708 for SV(C|O) and mtDNA

SEQ ID NO: 72195 - DNA, 120 bp, Homo sapiens
  misc_feature: 708 for SV(C|O) and mtDNA
tttgaagtagatagaaaccgacctggattactccggtctgaactcagatcacgtaggactttaatcgttgaacaaacgaacctttaatagcggctgcaccatcgggatgtcctgatccaa

SEQ ID NO: 72196 - DNA, 120 bp, Homo sapiens; identical to SEQ ID NO: 54611
  misc_feature: 708 for SV(C|O) and mtDNA

SEQ ID NO: 72197 - DNA, 120 bp, Homo sapiens; identical to SEQ ID NO: 54778
  misc_feature: 708 for SV(C|O) and mtDNA

SEQ ID NO: 72198 - DNA, 120 bp, Homo sapiens; identical to SEQ ID NO: 58047
  misc_feature: 708 for SV(C|O) and mtDNA

SEQ ID NO: 72199 - DNA, 120 bp, Homo sapiens; identical to SEQ ID NO: 60660
  misc_feature: 708 for SV(C|O) and mtDNA

SEQ ID NO: 72200 - DNA, 120 bp, Homo sapiens
  misc_feature: 708 for SV(C|O) and mtDNA
ttatgcggaggagaatgttttcatgttacttatactaacattagttcttctatagggtgatagattggtccaattgggtgtgaggagttcagttatatgtttgggattttttaggtagtg

SEQ ID NO: 72201 - DNA, 120 bp, Homo sapiens
  misc_feature: 708 for SV(C|O) and mtDNA
ggagccggagcaccctatgtcgcagtatctgtctttgattcctgcctcatcctattatttatcgcacctacgttcaatattacagacgaacatacttactaaagtgtgttaattaattaa

SEQ ID NO: 72202 - DNA, 120 bp, Homo sapiens
  misc_feature: 708 for SV(C|O) and mtDNA
gagacgctggagccggagcaccctatgtcgcagtatctgtctttgattcctgcctcatcctattatttatcgcacctacgttcaatattacagacgaacatacttactaaagtgtgttaa

SEQ ID NO: 72203 - DNA, 120 bp, Homo sapiens
  misc_feature: 708 for SV(C|O) and mtDNA
ccaaccacccaactatctataaacctagccatggccatccccttatgagcgggcgcagtgattataggctttcgctctaagattaaaaatgccctagcccacttcttaccacaaggcaca

SEQ ID NO: 72204 - DNA, 120 bp, Homo sapiens
  misc_feature: 708 for SV(C|O) and mtDNA
tgtctgataaaagagttactttgatagagtaaataataggagcttaaacccccttatttctaggactatgagaatcgaacccatccctgagaatccaaaattctccgtgccacctatcac

SEQ ID NO: 72205 - DNA, 120 bp, Homo sapiens
  misc_feature: 708 for SV(C|O) and mtDNA
gttccacagaagctgccatcaagtatttcctcacgcaagcaaccgcatccataatccttctaatagctatcctcttcaacaatatactctccggacaatgaaccataaccaatactacca

SEQ ID NO: 72206 - DNA, 120 bp, Homo sapiens
  misc_feature: 708 for SV(C|O) and mtDNA
tggggaacagctaaataggttgttgttgatttggttaaaaaatagtagagggatgatgctaataattaggctgtgggtggttgtgttgattcaaattatgtgttttttggaaagtcatgt

SEQ ID NO: 72207 - DNA, 120 bp, Homo sapiens; identical to SEQ ID NO: 58475
  misc_feature: 708 for SV(C|O) and mtDNA

SEQ ID NO: 72208 - DNA, 120 bp, Homo sapiens
  misc_feature: 708 for SV(C|O) and mtDNA
tacttcaaaggacatttaactaaaacccctacgcatttatatagaggagacaagtcgtaacatggtaagtgtactggaaagtgcacttggacgaaccagagtgtagcttaacacaaagca

SEQ ID NO: 72209 - DNA, 120 bp, Homo sapiens
  misc_feature: 708 for SV(C|O) and mtDNA
ggttggggaacagctaaataggttgttgttgatttggttaaaaaatagtagagggatgatgctaataattaggctgtgggtggttgtgttgattcaaattatgtgttttttggaaagtca

SEQ ID NO: 72210 - DNA, 120 bp, Homo sapiens; identical to SEQ ID NO: 60702
  misc_feature: 708 for SV(C|O) and mtDNA

SEQ ID NO: 72211 - DNA, 120 bp, Homo sapiens
  misc_feature: 708 for SV(C|O) and mtDNA
tcaccctagcattacttatatgatatgtctccatacccattacaatctccagcattccccctcaaacctaagaaatatgtctgataaaagagttactttgatagagtaaataataggagc

SEQ ID NO: 72212 - DNA, 120 bp, Homo sapiens
  misc_feature: 708 for SV(C|O) and mtDNA
ggaagggagcctactagggtgtagaataggaagtatgtgcctgcgttcaggcgttctggctggttgcctcatcgggtgatgatagccaaggtggggataagtgtggtttcgaagaagata

SEQ ID NO: 72213 - DNA, 120 bp, Homo sapiens; identical to SEQ ID NO: 58059
  misc_feature: 708 for SV(C|O) and mtDNA

SEQ ID NO: 72214 - DNA, 120 bp, Homo sapiens; identical to SEQ ID NO: 53483
  misc_feature: 708 for SV(C|O) and mtDNA

SEQ ID NO: 72215 - DNA, 120 bp, Homo sapiens
  misc_feature: 708 for SV(C|O) and mtDNA
tactactaatcaacgcccataatcatacaaagcccccgcaccaataggatcctcccgaatcaaccctgacccctctccttcataaattattcagcttcctacactattaaagtttaccac

SEQ ID NO: 72216 - DNA, 120 bp, Homo sapiens
  misc_feature: 708 for SV(C|O) and mtDNA
taataggagcttaaacccccttatttctaggactatgagaatcgaacccatccctgagaatccaaaattctccgtgccacctatcacaccccatcctaaagtaaggtcagctaaataagc

SEQ ID NO: 72217 - DNA, 120 bp, Homo sapiens; identical to SEQ ID NO: 53604
  misc_feature: 708 for SV(C|O) and mtDNA

SEQ ID NO: 72218 - DNA, 120 bp, Homo sapiens
  misc_feature: 708 for SV(C|O) and mtDNA
aactcacctgagttgtaaaaaactccagctgacacaaaatagactacgaaagtggctttaacatatctgaacacacaatagctaagacccaaactgggattagataccccactatgctta

SEQ ID NO: 72219 - DNA, 120 bp, Homo sapiens; identical to SEQ ID NO: 52121
  misc_feature: 708 for SV(C|O) and mtDNA

SEQ ID NO: 72220 - DNA, 120 bp, Homo sapiens
  misc_feature: 708 for SV(C|O) and mtDNA
gttgtatatagcctagaatttttcgttcggtaagcattaggaatgccattgcgattagaatgggtacaatgaggagtaggaggttggccatgggtatgttgttaagaagaggaattgaac

SEQ ID NO: 72221 - DNA, 120 bp, Homo sapiens; identical to SEQ ID NO: 54905
  misc_feature: 708 for SV(C|O) and mtDNA

SEQ ID NO: 72222 - DNA, 120 bp, Homo sapiens
  misc_feature: 708 for SV(C|O) and mtDNA
gtggagtccgtaaagaggtatctttactataaaagctattgtgtaagctagtcatattaagttgttggctcaggagtttgatagttcttgggcagtgagagtgagtagtagaatgtttag

SEQ ID NO: 72223 - DNA, 120 bp, Homo sapiens
  misc_feature: 708 for SV(C|O) and mtDNA
gcagtactgatcattctatttccccctctattgatccccacctccaaatatctcatcaacaaccgactaatcaccacccaacaatgactaatcaaactaacctcaaaacaaatgataacc

SEQ ID NO: 72224 - DNA, 120 bp, Homo sapiens
  misc_feature: 708 for SV(C|O) and mtDNA
caatcacactactccccatatctaacaacgtaaaaataaaatgacagtttgaacatacaaaacccaccccattcctccccacactcatcgcccttaccacgctactcctacctatctccc

SEQ ID NO: 72225 - DNA, 120 bp, Homo sapiens
  misc_feature: 708 for SV(C|O) and mtDNA
gcttgaattatttggtttcggttgttttctattagactatggtgagctcaggtgattgatactcctgatgcgagtaatacggatgtgtttaggagtgggacttctaggggatttagcggg

SEQ ID NO: 72226 - DNA, 120 bp, Homo sapiens
  misc_feature: 708 for SV(C|O) and mtDNA
gcttatgcggaggagaatgttttcatgttacttatactaacattagttcttctatagggtgatagattggtccaattgggtgtgaggagttcagttatatgtttgggattttttaggtag

SEQ ID NO: 72227 - DNA, 120 bp, Homo sapiens
  misc_feature: 708 for SV(C|O) and mtDNA
gattctaccctaccatcacacaccgcacaatcccctatctaggccttcttacgagccaaaacctgcccctactcctcctagacctaacctgactagaaaagctattacctaaaacaattt

SEQ ID NO: 72228 - DNA, 120 bp, Homo sapiens
  misc_feature: 708 for SV(C|O) and mtDNA
ctaacaacccccctcctaatactaactacctgactcctacccctcacaatcatggcaagccaacgccacttatccagtgaaccactatcacgaaaaaaactctacctctctatactaatc

SEQ ID NO: 72229 - DNA, 120 bp, Homo sapiens; identical to SEQ ID NO: 52943
  misc_feature: 708 for SV(C|O) and mtDNA

SEQ ID NO: 72230 - DNA, 120 bp, Homo sapiens; identical to SEQ ID NO: 58748
  misc_feature: 708 for SV(C|O) and mtDNA

SEQ ID NO: 72231 - DNA, 120 bp, Homo sapiens
  misc_feature: 708 for SV(C|O) and mtDNA
ctgtttgtcgtaggcagatggagcttgttataattatgcctcatagggatagtacaaggaaggggtaggctatgtgttttgtcagggggttgagaatgagtgtgaggcgtattataccat

SEQ ID NO: 72232 - DNA, 120 bp, Homo sapiens
  misc_feature: 708 for SV(C|O) and mtDNA
ctggagccggagcaccctatgtcgcagtatctgtctttgattcctgcctcatcctattatttatcgcacctacgttcaatattacagacgaacatacttactaaagtgtgttaattaatt

SEQ ID NO: 72233 - DNA, 120 bp, Homo sapiens
  misc_feature: 708 for SV(C|O) and mtDNA
ctattaccttcttattatttgatctagaaattgccctccttttacccctaccatgagccctacaaacaactaacctaccactaatagttatgtcatccctcttattaatcatcatcctag

SEQ ID NO: 72234 - DNA, 120 bp, Homo sapiens
  misc_feature: 708 for SV(C|O) and mtDNA
cgggggcaggcctcctagggagaggagggtggatggaattaagggtgttagtcatgttagcttgtttcaggtgcgagatagtagtagggtcgtggtgctggagtttaagttgagtagtag

SEQ ID NO: 72235 - DNA, 120 bp, Homo sapiens
  misc_feature: 708 for SV(C|O) and mtDNA
cgattagaatgggtacaatgaggagtaggaggttggccatgggtatgttgttaagaagaggaattgaacctctgactgtaaagttttaagttttatgcgattaccgggctctgccatctt

SEQ ID NO: 72236 - DNA, 120 bp, Homo sapiens
  misc_feature: 708 for SV(C|O) and mtDNA
cctatttattacctcagaagtttttttcttcgcaggatttttctgagccttttaccactccagcctagcccctaccccccaattaggagggcactggcccccaacaggcatcaccccgct

SEQ ID NO: 72237 - DNA, 120 bp, Homo sapiens; identical to SEQ ID NO: 52283
  misc_feature: 708 for SV(C|O) and mtDNA

SEQ ID NO: 72238 - DNA, 120 bp, Homo sapiens
  misc_feature: 708 for SV(C|O) and mtDNA
agccttctcctatttatgggggtttagtattgattgttagcggtgtggtcgggtgtgttattattctgaattttgggggaggttatatgggtttaatagtttttttaatttatttagggg

SEQ ID NO: 72239 - DNA, 120 bp, Homo sapiens
  misc_feature: 708 for SV(C|O) and mtDNA
ccatttccgacggcatctacggctcaacattttttgtagccacaggcttccacggacttcacgtcattattggctcaactttcctcactatctgcttcatccgccaactaatatttcact

SEQ ID NO: 72240 - DNA, 120 bp, Homo sapiens
  misc_feature: 708 for SV(C|O) and mtDNA
catactagttattatcgaaaccatcagcctactcattcaaccaatagccctggccgtacgcctaaccgctaacattactgcaggccacctactcatgcacctaattggaagcgccaccct

SEQ ID NO: 72241 - DNA, 120 bp, Homo sapiens
  misc_feature: 708 for SV(C|O) and mtDNA
attggtggctgcttttaggcctactatgggtgttaaattttttactctctctacaaggttttttcctagtgtccaaagagctgttcctctttggactaacagttaaatttacaaggggat

SEQ ID NO: 72242 - DNA, 120 bp, Homo sapiens
  misc_feature: 708 for SV(C|O) and mtDNA
agacgctggagccggagcaccctatgtcgcagtatctgtctttgattcctgcctcatcctattatttatcgcacctacgttcaatattacagacgaacatacttactaaagtgtgttaat

SEQ ID NO: 72243 - DNA, 120 bp, Homo sapiens
  misc_feature: 708 for SV(C|O) and mtDNA
acctgagttgtaaaaaactccagctgacacaaaatagactacgaaagtggctttaacatatctgaacacacaatagctaagacccaaactgggattagataccccactatgcttagccct

SEQ ID NO: 72244 - DNA, 120 bp, Homo sapiens; identical to SEQ ID NO: 57891
  misc_feature: 707 for SV(C|O) and mtDNA

SEQ ID NO: 72245 - DNA, 120 bp, Homo sapiens; identical to SEQ ID NO: 53796
  misc_feature: 707 for SV(C|O) and mtDNA

SEQ ID NO: 72246 - DNA, 120 bp, Homo sapiens
  misc_feature: 707 for SV(C|O) and mtDNA
tttagatttacagtccaatgcttcactcagccattttacctcacccccactgatgttcgccgaccgttgactattctctacaaaccacaaagacattggaacactatacctattattcgg

SEQ ID NO: 72247 - DNA, 120 bp, Homo sapiens
  misc_feature: 707 for SV(C|O) and mtDNA
ttccacagaagctgccatcaagtatttcctcacgcaagcaaccgcatccataatccttctaatagctatcctcttcaacaatatactctccggacaatgaaccataaccaatactaccaa

SEQ ID NO: 72248 - DNA, 120 bp, Homo sapiens
  misc_feature: 707 for SV(C|O) and mtDNA
acctggcgcaatagatatagtaccgcaagggaaagatgaaaaattataaccaagcataatacagcaaggactaacccctataccttctgcataatgaattaactagaaataactttgcaa

SEQ ID NO: 72249 - DNA, 120 bp, Homo sapiens
  misc_feature: 707 for SV(C|O) and mtDNA
ttgaattatttggtttcggttgttttctattagactatggtgagctcaggtgattgatactcctgatgcgagtaatacggatgtgtttaggagtgggacttctaggggatttagcggggt

SEQ ID NO: 72250 - DNA, 120 bp, Homo sapiens
  misc_feature: 707 for SV(C|O) and mtDNA
atacagaaatagtcaaaccacgtctacaaaatgccagtatcaggcggcggcttcgaagccaaagtgatgtttggatgtaaagtgaaatattagttggcggatgaagcagatagtgaggaa

SEQ ID NO: 72251 - DNA, 120 bp, Homo sapiens
  misc_feature: 707 for SV(C|O) and mtDNA
cgctggagccggagcaccctatgtcgcagtatctgtctttgattcctgcctcatcctattatttatcgcacctacgttcaatattacagacgaacatacttactaaagtgtgttaattaa

SEQ ID NO: 72252 - DNA, 120 bp, Homo sapiens
  misc_feature: 707 for SV(C|O) and mtDNA
tgtttgtcgtaggcagatggagcttgttataattatgcctcatagggatagtacaaggaaggggtaggctatgtgttttgtcagggggttgagaatgagtgtgaggcgtattataccata

SEQ ID NO: 72253 - DNA, 120 bp, Homo sapiens
  misc_feature: 707 for SV(C|O) and mtDNA
tgttcgtctgtaatattgaacgtaggtgcgataaataataggatgaggcaggaatcaaagacagatactgcgacatagggtgctccggctccagcgtctcgcaatgctatcgcgtgcaca

SEQ ID NO: 72254 - DNA, 120 bp, Homo sapiens; identical to SEQ ID NO: 53335
  misc_feature: 707 for SV(C|O) and mtDNA

SEQ ID NO: 72255 - DNA, 120 bp, Homo sapiens
  misc_feature: 707 for SV(C|O) and mtDNA
cctatgtcgcagtatctgtctttgattcctgcctcatcctattatttatcgcacctacgttcaatattacagacgaacatacttactaaagtgtgttaattaattaatgcttgtaggaca

SEQ ID NO: 72256 - DNA, 120 bp, Homo sapiens
  misc_feature: 707 for SV(C|O) and mtDNA
tggcccaccataattacccccatactccttacactattcctcatcacccaactaaaaatattaaacacaaactaccacctacctccctcaccaaagcccataaaaataaaaaattataac

SEQ ID NO: 72257 - DNA, 120 bp, Homo sapiens
  misc_feature: 707 for SV(C|O) and mtDNA
tgcctcatcgggtgatgatagccaaggtggggataagtgtggtttcgaagaagatataaaatatgattagttctgtggctgtgaatgttataattaaggagatttgtagggagattagta

SEQ ID NO: 72258 - DNA, 120 bp, Homo sapiens
  misc_feature: 707 for SV(C|O) and mtDNA
tgattaatgtttgggtctgagtttatatatcacagtgagaattctatgatggaccatgtaacgaataatgctacagggatgaatattatggagaagtagtctagtttgaagcttagggag

SEQ ID NO: 72259 - DNA, 120 bp, Homo sapiens
  misc_feature: 707 for SV(C|O) and mtDNA
ccttctcctatttatgggggtttagtattgattgttagcggtgtggtcgggtgtgttattattctgaattttgggggaggttatatgggtttaatagtttttttaatttatttaggggga

SEQ ID NO: 72260 - DNA, 120 bp, Homo sapiens
  misc_feature: 707 for SV(C|O) and mtDNA
gaatactagtataccgctcacacctcatatcctccctactatgcctagaaggaataatactatcactgttcattatagctactctcataaccctcaacacccactccctcttagccaata

SEQ ID NO: 72261 - DNA, 120 bp, Homo sapiens
  misc_feature: 707 for SV(C|O) and mtDNA
ccactatgcacattttatttctccaacatactcggattctaccctaccatcacacaccgcacaatcccctatctaggccttcttacgagccaaaacctgcccctactcctcctagaccta

SEQ ID NO: 72262 - DNA, 120 bp, Homo sapiens; identical to SEQ ID NO: 52556
  misc_feature: 707 for SV(C|O) and mtDNA

SEQ ID NO: 72263 - DNA, 120 bp, Homo sapiens
  misc_feature: 707 for SV(C|O) and mtDNA
gggataacagcgcaatcctattctagagtccatatcaacaatagggtttacgacctcgatgttggatcaggacatcccgatggtgcagccgctattaaaggttcgtttgttcaacgatta

SEQ ID NO: 72264 - DNA, 120 bp, Homo sapiens
  misc_feature: 707 for SV(C|O) and mtDNA
gttagcgggggcaggcctcctagggagaggagggtggatggaattaagggtgttagtcatgttagcttgtttcaggtgcgagatagtagtagggtcgtggtgctggagtttaagttgagt

SEQ ID NO: 72265 - DNA, 120 bp, Homo sapiens
  misc_feature: 707 for SV(C|O) and mtDNA
cccatactagttattatcgaaaccatcagcctactcattcaaccaatagccctggccgtacgcctaaccgctaacattactgcaggccacctactcatgcacctaattggaagcgccacc

SEQ ID NO: 72266 - DNA, 120 bp, Homo sapiens
  misc_feature: 707 for SV(C|O) and mtDNA
gggaagggagcctactagggtgtagaataggaagtatgtgcctgcgttcaggcgttctggctggttgcctcatcgggtgatgatagccaaggtggggataagtgtggtttcgaagaagat

SEQ ID NO: 72267 - DNA, 120 bp, Homo sapiens; identical to SEQ ID NO: 56643
  misc_feature: 707 for SV(C|O) and mtDNA

SEQ ID NO: 72268 - DNA, 120 bp, Homo sapiens
  misc_feature: 707 for SV(C|O) and mtDNA
ctagacatcgtactacacgacacgtactacgttgtagctcacttccactatgtcctatcaataggagctgtatttgccatcataggaggcttcattcactgatttcccctattctcaggc

SEQ ID NO: 72269 - DNA, 120 bp, Homo sapiens
  misc_feature: 707 for SV(C|O) and mtDNA
gcctactagggtgtagaataggaagtatgtgcctgcgttcaggcgttctggctggttgcctcatcgggtgatgatagccaaggtggggataagtgtggtttcgaagaagatataaaatat

SEQ ID NO: 72270 - DNA, 120 bp, Homo sapiens
  misc_feature: 707 for SV(C|O) and mtDNA
gccggagcaccctatgtcgcagtatctgtctttgattcctgcctcatcctattatttatcgcacctacgttcaatattacagacgaacatacttactaaagtgtgttaattaattaatgc

SEQ ID NO: 72271 - DNA, 120 bp, Homo sapiens
  misc_feature: 707 for SV(C|O) and mtDNA
aggagcttaaacccccttatttctaggactatgagaatcgaacccatccctgagaatccaaaattctccgtgccacctatcacaccccatcctaaagtaaggtcagctaaataagctatc

SEQ ID NO: 72272 - DNA, 120 bp, Homo sapiens
  misc_feature: 707 for SV(C|O) and mtDNA
aggttggggaacagctaaataggttgttgttgatttggttaaaaaatagtagagggatgatgctaataattaggctgtgggtggttgtgttgattcaaattatgtgttttttggaaagtc

SEQ ID NO: 72273 - DNA, 120 bp, Homo sapiens; identical to SEQ ID NO: 58636
  misc_feature: 707 for SV(C|O) and mtDNA

SEQ ID NO: 72274 - DNA, 120 bp, Homo sapiens
  misc_feature: 707 for SV(C|O) and mtDNA
gaacagctaaataggttgttgttgatttggttaaaaaatagtagagggatgatgctaataattaggctgtgggtggttgtgttgattcaaattatgtgttttttggaaagtcatgtcagt

SEQ ID NO: 72275 - DNA, 120 bp, Homo sapiens
  misc_feature: 707 for SV(C|O) and mtDNA
gaaaagtcctaatagtagaagaaccctccataaacctggagtgactatatggatgccccccaccctaccacacattcgaagaacccgtatacataaaatctagacaaaaaaggaaggaat

SEQ ID NO: 72276 - DNA, 120 bp, Homo sapiens
  misc_feature: 707 for SV(C|O) and mtDNA
ctgtggtgatttggaggatcaggcaggcgccaaggagtgagccgaagtttcatcatgcggagatgttggatggggtggggaggtcgatgaatgagtggttaattaattttattagggggt

SEQ ID NO: 72277 - DNA, 120 bp, Homo sapiens
  misc_feature: 707 for SV(C|O) and mtDNA
cctttttggacaggtggtgtgtggtggccttggtatgtgctttctcgtgttacatcgcgccatcattggtatatggttagtgtgttggttagtaggcctagtatgaggagcgttatggag

SEQ ID NO: 72278 - DNA, 120 bp, Homo sapiens
  misc_feature: 707 for SV(C|O) and mtDNA
atagtttaaacaaaacgaatgatttcgactcattaaattatgataatcatatttaccaaatgcccctcatttacataaatattatactagcatttaccatctcacttctaggaatactag

SEQ ID NO: 72279 - DNA, 120 bp, Homo sapiens
  misc_feature: 707 for SV(C|O) and mtDNA
agggagtcataagtggagtccgtaaagaggtatctttactataaaagctattgtgtaagctagtcatattaagttgttggctcaggagtttgatagttcttgggcagtgagagtgagtag

SEQ ID NO: 72280 - DNA, 120 bp, Homo sapiens
  misc_feature: 707 for SV(C|O) and mtDNA
cgaagcgaaggcttctcaaatcatgaaaattattaatattactgctgttagagaaatgaatgagcctacagatgataggatgtttcatgtggtgtatgcatcggggtagtccgagtaacg

SEQ ID NO: 72281 - DNA, 120 bp, Homo sapiens; identical to SEQ ID NO: 59444
  misc_feature: 707 for SV(C|O) and mtDNA

SEQ ID NO: 72282 - DNA, 120 bp, Homo sapiens
  misc_feature: 707 for SV(C|O) and mtDNA
ccaccccatccaacatctccgcatgatgaaacttcggctcactccttggcgcctgcctgatcctccaaatcaccacaggactattcctagccatgcactactcaccagacgcctcaaccg

SEQ ID NO: 72283 - DNA, 120 bp, Homo sapiens
  misc_feature: 707 for SV(C|O) and mtDNA
cgaagaaaaaaacttctgaggtaataaataggattatcccgtatcgaaggcctttttggacaggtggtgtgtggtggccttggtatgtgctttctcgtgttacatcgcgccatcattggt

SEQ ID NO: 72284 - DNA, 120 bp, Homo sapiens
  misc_feature: 707 for SV(C|O) and mtDNA
cattgcgagacgctggagccggagcaccctatgtcgcagtatctgtctttgattcctgcctcatcctattatttatcgcacctacgttcaatattacagacgaacatacttactaaagtg

SEQ ID NO: 72285 - DNA, 120 bp, Homo sapiens
  misc_feature: 707 for SV(C|O) and mtDNA
aaatatgtctgataaaagagttactttgatagagtaaataataggagcttaaacccccttatttctaggactatgagaatcgaacccatccctgagaatccaaaattctccgtgccacct

SEQ ID NO: 72286 - DNA, 120 bp, Homo sapiens; identical to SEQ ID NO: 60628
  misc_feature: 707 for SV(C|O) and mtDNA

SEQ ID NO: 72287 - DNA, 120 bp, Homo sapiens; identical to SEQ ID NO: 52497
  misc_feature: 707 for SV(C|O) and mtDNA

SEQ ID NO: 72288 - DNA, 120 bp, Homo sapiens; identical to SEQ ID NO: 52878
  misc_feature: 706 for SV(C|O) and mtDNA

SEQ ID NO: 72289 - DNA, 120 bp, Homo sapiens
  misc_feature: 706 for SV(C|O) and mtDNA
ttcttagtagctattaccttcttattatttgatctagaaattgccctccttttacccctaccatgagccctacaaacaactaacctaccactaatagttatgtcatccctcttattaatc

SEQ ID NO: 72290 - DNA, 120 bp, Homo sapiens; identical to SEQ ID NO: 54356
  misc_feature: 706 for SV(C|O) and mtDNA

SEQ ID NO: 72291 - DNA, 120 bp, Homo sapiens; identical to SEQ ID NO: 57683
  misc_feature: 706 for SV(C|O) and mtDNA

SEQ ID NO: 72292 - DNA, 120 bp, Homo sapiens
  misc_feature: 706 for SV(C|O) and mtDNA
tgaagtagatagaaaccgacctggattactccggtctgaactcagatcacgtaggactttaatcgttgaacaaacgaacctttaatagcggctgcaccatcgggatgtcctgatccaaca

SEQ ID NO: 72293 - DNA, 120 bp, Homo sapiens
  misc_feature: 706 for SV(C|O) and mtDNA
tgtgttggagattgagactagtagggctaggcccaccgctgcttcgcaggcggcaaagactagtatggcaataggcacaatattggctaagagggagtgggtgttgagggttatgagagt

SEQ ID NO: 72294 - DNA, 120 bp, Homo sapiens; identical to SEQ ID NO: 56365
  misc_feature: 706 for SV(C|O) and mtDNA

SEQ ID NO: 72295 - DNA, 120 bp, Homo sapiens
  misc_feature: 706 for SV(C|O) and mtDNA
tggagctttaatttattaatgcaaacagtacctaacaaacccacaggtcctaaactaccaaacctgcattaaaaatttcggttggggcgacctcggagcagaacccaacctccgagcagt

SEQ ID NO: 72296 - DNA, 120 bp, Homo sapiens
  misc_feature: 706 for SV(C|O) and mtDNA
tgcttgaattatttggtttcggttgttttctattagactatggtgagctcaggtgattgatactcctgatgcgagtaatacggatgtgtttaggagtgggacttctaggggatttagcgg

SEQ ID NO: 72297 - DNA, 120 bp, Homo sapiens
  misc_feature: 706 for SV(C|O) and mtDNA
tgcgattagaatgggtacaatgaggagtaggaggttggccatgggtatgttgttaagaagaggaattgaacctctgactgtaaagttttaagttttatgcgattaccgggctctgccatc

SEQ ID NO: 72298 - DNA, 120 bp, Homo sapiens; identical to SEQ ID NO: 52907
  misc_feature: 706 for SV(C|O) and mtDNA

SEQ ID NO: 72299 - DNA, 120 bp, Homo sapiens
  misc_feature: 706 for SV(C|O) and mtDNA
tgaattatttggtttcggttgttttctattagactatggtgagctcaggtgattgatactcctgatgcgagtaatacggatgtgtttaggagtgggacttctaggggatttagcggggtg

SEQ ID NO: 72300 - DNA, 120 bp, Homo sapiens
  misc_feature: 706 for SV(C|O) and mtDNA
tccaacatctccgcatgatgaaacttcggctcactccttggcgcctgcctgatcctccaaatcaccacaggactattcctagccatgcactactcaccagacgcctcaaccgccttttca

SEQ ID NO: 72301 - DNA, 120 bp, Homo sapiens; identical to SEQ ID NO: 54343
  misc_feature: 706 for SV(C|O) and mtDNA

SEQ ID NO: 72302 - DNA, 120 bp, Homo sapiens
  misc_feature: 706 for SV(C|O) and mtDNA
gattaatgtttgggtctgagtttatatatcacagtgagaattctatgatggaccatgtaacgaataatgctacagggatgaatattatggagaagtagtctagtttgaagcttagggaga

SEQ ID NO: 72303 - DNA, 120 bp, Homo sapiens
  misc_feature: 706 for SV(C|O) and mtDNA
ctagggataacagcgcaatcctattctagagtccatatcaacaatagggtttacgacctcgatgttggatcaggacatcccgatggtgcagccgctattaaaggttcgtttgttcaacga

SEQ ID NO: 72304 - DNA, 120 bp, Homo sapiens
  misc_feature: 706 for SV(C|O) and mtDNA
catacagaaatagtcaaaccacgtctacaaaatgccagtatcaggcggcggcttcgaagccaaagtgatgtttggatgtaaagtgaaatattagttggcggatgaagcagatagtgagga

SEQ ID NO: 72305 - DNA, 120 bp, Homo sapiens
  misc_feature: 706 for SV(C|O) and mtDNA
catgagttagcagttcttgtgagctttctcggtaaataaggggtcgtaagcctctgttgtcagattcacaatctgatgttttggttaaactatatttacaagaggaaaacccggtaatga

SEQ ID NO: 72306 - DNA, 120 bp, Homo sapiens
  misc_feature: 706 for SV(C|O) and mtDNA
ctactagggtgtagaataggaagtatgtgcctgcgttcaggcgttctggctggttgcctcatcgggtgatgatagccaaggtggggataagtgtggtttcgaagaagatataaaatatga

SEQ ID NO: 72307 - DNA, 120 bp, Homo sapiens; identical to SEQ ID NO: 61561
  misc_feature: 706 for SV(C|O) and mtDNA

SEQ ID NO: 72308 - DNA, 120 bp, Homo sapiens
  misc_feature: 706 for SV(C|O) and mtDNA
gtactgatcattctatttccccctctattgatccccacctccaaatatctcatcaacaaccgactaatcaccacccaacaatgactaatcaaactaacctcaaaacaaatgataaccata

SEQ ID NO: 72309 - DNA, 120 bp, Homo sapiens
  misc_feature: 706 for SV(C|O) and mtDNA
gccgcagtactgatcattctatttccccctctattgatccccacctccaaatatctcatcaacaaccgactaatcaccacccaacaatgactaatcaaactaacctcaaaacaaatgata

SEQ ID NO: 72310 - DNA, 120 bp, Homo sapiens
  misc_feature: 706 for SV(C|O) and mtDNA
ataatcataatggctatagcaataaaactaggaatagccccctttcacttctgggtcccagaggttacccaaggcacccctctgacatccggcctgcttcttctcacatgacaaaaacta

SEQ ID NO: 72311 - DNA, 120 bp, Homo sapiens
  misc_feature: 706 for SV(C|O) and mtDNA
caaaatgtaataattattagtagtaaggctaggagggtgttgattattaaaattaaggcgaagtttattactcttttttgaatgttgtcaaaactagttaattggaagttaacggtacta

SEQ ID NO: 72312 - DNA, 120 bp, Homo sapiens
  misc_feature: 706 for SV(C|O) and mtDNA
aatatgtctgataaaagagttactttgatagagtaaataataggagcttaaacccccttatttctaggactatgagaatcgaacccatccctgagaatccaaaattctccgtgccaccta

SEQ ID NO: 72313 - DNA, 120 bp, Homo sapiens; identical to SEQ ID NO: 52686
  misc_feature: 706 for SV(C|O) and mtDNA

SEQ ID NO: 72314 - DNA, 120 bp, Homo sapiens
  misc_feature: 706 for SV(C|O) and mtDNA
gaagaaaaaaacttctgaggtaataaataggattatcccgtatcgaaggcctttttggacaggtggtgtgtggtggccttggtatgtgctttctcgtgttacatcgcgccatcattggta

SEQ ID NO: 72315 - DNA, 120 bp, Homo sapiens; identical to SEQ ID NO: 58021
  misc_feature: 706 for SV(C|O) and mtDNA

SEQ ID NO: 72316 - DNA, 120 bp, Homo sapiens
  misc_feature: 706 for SV(C|O) and mtDNA
taattggtggctgcttttaggcctactatgggtgttaaattttttactctctctacaaggttttttcctagtgtccaaagagctgttcctctttggactaacagttaaatttacaagggg

SEQ ID NO: 72317 - DNA, 120 bp, Homo sapiens; identical to SEQ ID NO: 62173
  misc_feature: 706 for SV(C|O) and mtDNA

SEQ ID NO: 72318 - DNA, 120 bp, Homo sapiens
  misc_feature: 706 for SV(C|O) and mtDNA
gtactacaggtggtcaagtatttatggtaccgtacaatattcatggtggctggcagtaatgtacgaattacatagcggttgttgatgggtgagtcaatacttgggtggcacccaaatctg

SEQ ID NO: 72319 - DNA, 120 bp, Homo sapiens
  misc_feature: 706 for SV(C|O) and mtDNA
caccataattacccccatactccttacactattcctcatcacccaactaaaaatattaaacacaaactaccacctacctccctcaccaaagcccataaaaataaaaaattataacaaacc

SEQ ID NO: 72320 - DNA, 120 bp, Homo sapiens
  misc_feature: 706 for SV(C|O) and mtDNA
ggtaagcattaggaatgccattgcgattagaatgggtacaatgaggagtaggaggttggccatgggtatgttgttaagaagaggaattgaacctctgactgtaaagttttaagttttatg

SEQ ID NO: 72321 - DNA, 120 bp, Homo sapiens
  misc_feature: 706 for SV(C|O) and mtDNA
gggagtcataagtggagtccgtaaagaggtatctttactataaaagctattgtgtaagctagtcatattaagttgttggctcaggagtttgatagttcttgggcagtgagagtgagtagt

SEQ ID NO: 72322 - DNA, 120 bp, Homo sapiens
  misc_feature: 706 for SV(C|O) and mtDNA
ggaggagaatgttttcatgttacttatactaacattagttcttctatagggtgatagattggtccaattgggtgtgaggagttcagttatatgtttgggattttttaggtagtgggtgtt

SEQ ID NO: 72323 - DNA, 120 bp, Homo sapiens; identical to SEQ ID NO: 52924
  misc_feature: 706 for SV(C|O) and mtDNA

SEQ ID NO: 72324 - DNA, 120 bp, Homo sapiens
  misc_feature: 706 for SV(C|O) and mtDNA
atcaggacatcccgatggtgcagccgctattaaaggttcgtttgttcaacgattaaagtcctacgtgatctgagttcagaccggagtaatccaggtcggtttctatctacttcaaattcc

SEQ ID NO: 72325 - DNA, 120 bp, Homo sapiens
  misc_feature: 706 for SV(C|O) and mtDNA
gcgagacgctggagccggagcaccctatgtcgcagtatctgtctttgattcctgcctcatcctattatttatcgcacctacgttcaatattacagacgaacatacttactaaagtgtgtt

SEQ ID NO: 72326 - DNA, 120 bp, Homo sapiens
  misc_feature: 706 for SV(C|O) and mtDNA
gcattgcgagacgctggagccggagcaccctatgtcgcagtatctgtctttgattcctgcctcatcctattatttatcgcacctacgttcaatattacagacgaacatacttactaaagt

SEQ ID NO: 72327 - DNA, 120 bp, Homo sapiens
  misc_feature: 706 for SV(C|O) and mtDNA
gagccggagcaccctatgtcgcagtatctgtctttgattcctgcctcatcctattatttatcgcacctacgttcaatattacagacgaacatacttactaaagtgtgttaattaattaat

SEQ ID NO: 72328 - DNA, 120 bp, Homo sapiens; identical to SEQ ID NO: 59615
  misc_feature: 706 for SV(C|O) and mtDNA

SEQ ID NO: 72329 - DNA, 120 bp, Homo sapiens
  misc_feature: 706 for SV(C|O) and mtDNA
ctatttatgggggtttagtattgattgttagcggtgtggtcgggtgtgttattattctgaattttgggggaggttatatgggtttaatagtttttttaatttatttagggggaatgatgg

SEQ ID NO: 72330 - DNA, 120 bp, Homo sapiens
  misc_feature: 706 for SV(C|O) and mtDNA
atgtttgggtctgagtttatatatcacagtgagaattctatgatggaccatgtaacgaataatgctacagggatgaatattatggagaagtagtctagtttgaagcttagggagagctgg

SEQ ID NO: 72331 - DNA, 120 bp, Homo sapiens; identical to SEQ ID NO: 53844
  misc_feature: 706 for SV(C|O) and mtDNA

SEQ ID NO: 72332 - DNA, 120 bp, Homo sapiens; identical to SEQ ID NO: 59103
  misc_feature: 706 for SV(C|O) and mtDNA

SEQ ID NO: 72333 - DNA, 120 bp, Homo sapiens
  misc_feature: 706 for SV(C|O) and mtDNA
cagctaaataggttgttgttgatttggttaaaaaatagtagagggatgatgctaataattaggctgtgggtggttgtgttgattcaaattatgtgttttttggaaagtcatgtcagtggt

SEQ ID NO: 72334 - DNA, 120 bp, Homo sapiens
  misc_feature: 706 for SV(C|O) and mtDNA
caccctagcattacttatatgatatgtctccatacccattacaatctccagcattccccctcaaacctaagaaatatgtctgataaaagagttactttgatagagtaaataataggagct

SEQ ID NO: 72335 - DNA, 120 bp, Homo sapiens
  misc_feature: 706 for SV(C|O) and mtDNA
atttatgggggtttagtattgattgttagcggtgtggtcgggtgtgttattattctgaattttgggggaggttatatgggtttaatagtttttttaatttatttagggggaatgatggtt

SEQ ID NO: 72336 - DNA, 120 bp, Homo sapiens
  misc_feature: 706 for SV(C|O) and mtDNA
actatcaaactcctgagccaacaacttaatatgactagcttacacaatagcttttatagtaaagatacctctttacggactccacttatgactccctaaagcccatgtcgaagcccccat

SEQ ID NO: 72337 - DNA, 120 bp, Homo sapiens
  misc_feature: 706 for SV(C|O) and mtDNA
atgggggctagtttttgtcatgtgagaagaagcaggccggatgtcagaggggtgccttgggtaacctctgggacccagaagtgaaagggggctattcctagttttattgctatagccatt

SEQ ID NO: 72338 - DNA, 120 bp, Homo sapiens; identical to SEQ ID NO: 54748
  misc_feature: 706 for SV(C|O) and mtDNA

SEQ ID NO: 72339 - DNA, 120 bp, Homo sapiens; identical to SEQ ID NO: 52222
  misc_feature: 706 for SV(C|O) and mtDNA

SEQ ID NO: 72340 - DNA, 120 bp, Homo sapiens
  misc_feature: 706 for SV(C|O) and mtDNA
agaaatagtcaaaccacgtctacaaaatgccagtatcaggcggcggcttcgaagccaaagtgatgtttggatgtaaagtgaaatattagttggcggatgaagcagatagtgaggaaagtt

SEQ ID NO: 72341 - DNA, 120 bp, Homo sapiens
  misc_feature: 706 for SV(C|O) and mtDNA
aagattaagagaaccaacacctctttacagtgaaatgccccaactaaatactaccgtatggcccaccataattacccccatactccttacactattcctcatcacccaactaaaaatatt

SEQ ID NO: 72342 - DNA, 120 bp, Homo sapiens
  misc_feature: 705 for SV(C|O) and mtDNA
ccactaaaacactcaccaagacctcaacccctgacccccatgcctcaggatactcctcaatagccatcgctgtagtatatccaaagacaaccatcattccccctaaataaattaaaaaaa

SEQ ID NO: 72343 - DNA, 120 bp, Homo sapiens
  misc_feature: 705 for SV(C|O) and mtDNA
gcactggcccccaacaggcatcaccccgctaaatcccctagaagtcccactcctaaacacatccgtattactcgcatcaggagtatcaatcacctgagctcaccatagtctaatagaaaa

SEQ ID NO: 72344 - DNA, 120 bp, Homo sapiens
  misc_feature: 705 for SV(C|O) and mtDNA
ttttaggtctgtttgtcgtaggcagatggagcttgttataattatgcctcatagggatagtacaaggaaggggtaggctatgtgttttgtcagggggttgagaatgagtgtgaggcgtat

SEQ ID NO: 72345 - DNA, 120 bp, Homo sapiens
  misc_feature: 705 for SV(C|O) and mtDNA
cccattatgtaaaatccattgtcgcatccacctttattatcagtctcttccccacaacaatattcatgtgcctagaccaagaagttattatctcgaactgacactgagccacaacccaaa

SEQ ID NO: 72346 - DNA, 120 bp, Homo sapiens
  misc_feature: 705 for SV(C|O) and mtDNA
ggatatactacagcgatggctattgaggagtatcctgaggcatgggggtcaggggttgaggtcttggtgagtgttttagtggggttagcgatggaggtaggattggtgctgtgggtgaaa

SEQ ID NO: 72347 - DNA, 120 bp, Homo sapiens; identical to SEQ ID NO: 53167
  misc_feature: 705 for SV(C|O) and mtDNA

SEQ ID NO: 72348 - DNA, 120 bp, Homo sapiens; identical to SEQ ID NO: 56563
  misc_feature: 705 for SV(C|O) and mtDNA

SEQ ID NO: 72349 - DNA, 120 bp, Homo sapiens; identical to SEQ ID NO: 57261
  misc_feature: 705 for SV(C|O) and mtDNA

SEQ ID NO: 72350 - DNA, 120 bp, Homo sapiens; identical to SEQ ID NO: 61317
  misc_feature: 705 for SV(C|O) and mtDNA

SEQ ID NO: 72351 - DNA, 120 bp, Homo sapiens
  misc_feature: 705 for SV(C|O) and mtDNA
ttcatgtggtgtatgcatcggggtagtccgagtaacgtcggggcattccggataggccgagaaagtgttgtgggaagaaagttagatttacgccgatgaatatgatagtgaaatggattt

SEQ ID NO: 72352 - DNA, 120 bp, Homo sapiens
  misc_feature: 705 for SV(C|O) and mtDNA
tgaaggctacaaagtaagcgcaagtacccacgtaaagacgttaggtcaaggtgtagcccatgaggtggcaagaaatgggctacattttctaccccagaaaactacgatagcccttatgaa

SEQ ID NO: 72353 - DNA, 120 bp, Homo sapiens
  misc_feature: 705 for SV(C|O) and mtDNA
ttaggccccaaaaattttggtgcaactccaaataaaagtaacaaccatgcacactactataaccaccctaaccctgacttccctaattccccccatccttaccaccctcgttaaccctaa

SEQ ID NO: 72354 - DNA, 120 bp, Homo sapiens; identical to SEQ ID NO: 59061
  misc_feature: 705 for SV(C|O) and mtDNA

SEQ ID NO: 72355 - DNA, 120 bp, Homo sapiens; identical to SEQ ID NO: 54723
  misc_feature: 705 for SV(C|O) and mtDNA

SEQ ID NO: 72356 - DNA, 120 bp, Homo sapiens
  misc_feature: 705 for SV(C|O) and mtDNA
tgttatccctagggtaacttgttccgttggtcaagttattggatcaattgagtatagtagttcgctttgactggtgaagtcttagcatgtactgctcggaggttgggttctgctccgagg

SEQ ID NO: 72357 - DNA, 120 bp, Homo sapiens
  misc_feature: 705 for SV(C|O) and mtDNA
gcagtactcttaaaactaggcggctatggtataatacgcctcacactcattctcaaccccctgacaaaacacatagcctaccccttccttgtactatccctatgaggcataattataaca

SEQ ID NO: 72358 - DNA, 120 bp, Homo sapiens; identical to SEQ ID NO: 52168
  misc_feature: 705 for SV(C|O) and mtDNA

SEQ ID NO: 72359 - DNA, 120 bp, Homo sapiens; identical to SEQ ID NO: 54466
  misc_feature: 705 for SV(C|O) and mtDNA

SEQ ID NO: 72360 - DNA, 120 bp, Homo sapiens
  misc_feature: 705 for SV(C|O) and mtDNA
taccactccagcctagcccctaccccccaattaggagggcactggcccccaacaggcatcaccccgctaaatcccctagaagtcccactcctaaacacatccgtattactcgcatcagga

SEQ ID NO: 72361 - DNA, 120 bp, Homo sapiens
  misc_feature: 705 for SV(C|O) and mtDNA
atgaaggctacaaagtaagcgcaagtacccacgtaaagacgttaggtcaaggtgtagcccatgaggtggcaagaaatgggctacattttctaccccagaaaactacgatagcccttatga

SEQ ID NO: 72362 - DNA, 120 bp, Homo sapiens
  misc_feature: 705 for SV(C|O) and mtDNA
ctttagggagtcataagtggagtccgtaaagaggtatctttactataaaagctattgtgtaagctagtcatattaagttgttggctcaggagtttgatagttcttgggcagtgagagtga

SEQ ID NO: 72363 - DNA, 120 bp, Homo sapiens
  misc_feature: 705 for SV(C|O) and mtDNA
tatccctagggtaacttgttccgttggtcaagttattggatcaattgagtatagtagttcgctttgactggtgaagtcttagcatgtactgctcggaggttgggttctgctccgaggtcg

SEQ ID NO: 72364 - DNA, 120 bp, Homo sapiens
  misc_feature: 705 for SV(C|O) and mtDNA
cctacaccccttatccccatactagttattatcgaaaccatcagcctactcattcaaccaatagccctggccgtacgcctaaccgctaacattactgcaggccacctactcatgcaccta

SEQ ID NO: 72365 - DNA, 120 bp, Homo sapiens
  misc_feature: 705 for SV(C|O) and mtDNA
tagggagtcataagtggagtccgtaaagaggtatctttactataaaagctattgtgtaagctagtcatattaagttgttggctcaggagtttgatagttcttgggcagtgagagtgagta

SEQ ID NO: 72366 - DNA, 120 bp, Homo sapiens
  misc_feature: 705 for SV(C|O) and mtDNA
atcctagtgggtgaggggtggctttggagttgcagttgatgtgtgatagttgagggttgattgctgtacttgcttgtaagcatggggagggggttttgatgtggattgggtttttatgta

SEQ ID NO: 72367 - DNA, 120 bp, Homo sapiens
  misc_feature: 705 for SV(C|O) and mtDNA
gtcagaagcttatgttgtttatgcggggaaacgccatatcgggggcaccgattattaggggaactagtcagttgccaaagcctccgattatgatgggtattactatgaagaagattatta

SEQ ID NO: 72368 - DNA, 120 bp, Homo sapiens
  misc_feature: 705 for SV(C|O) and mtDNA
cgagacgctggagccggagcaccctatgtcgcagtatctgtctttgattcctgcctcatcctattatttatcgcacctacgttcaatattacagacgaacatacttactaaagtgtgtta

SEQ ID NO: 72369 - DNA, 120 bp, Homo sapiens; identical to SEQ ID NO: 57573
  misc_feature: 705 for SV(C|O) and mtDNA

SEQ ID NO: 72370 - DNA, 120 bp, Homo sapiens; identical to SEQ ID NO: 59121
  misc_feature: 705 for SV(C|O) and mtDNA

SEQ ID NO: 72371 - DNA, 120 bp, Homo sapiens
  misc_feature: 705 for SV(C|O) and mtDNA
gcactcgtaaggggtggatttttctatgtagccgttgagttgtggtagtcaaaatgtaataattattagtagtaaggctaggagggtgttgattattaaaattaaggcgaagtttattac

SEQ ID NO: 72372 - DNA, 120 bp, Homo sapiens
  misc_feature: 705 for SV(C|O) and mtDNA
ggttgtagtagcccgtaggggcctacaacgttggggcctttgcgtagttgtatatagcctagaatttttcgttcggtaagcattaggaatgccattgcgattagaatgggtacaatgagg

SEQ ID NO: 72373 - DNA, 120 bp, Homo sapiens
  misc_feature: 705 for SV(C|O) and mtDNA
ggggctcactcacccaccacattaacaacataaaaccctcattcacacgagaaaacaccctcatgttcatacacctatcccccattctcctcctatccctcaaccccgacatcattaccg

SEQ ID NO: 72374 - DNA, 120 bp, Homo sapiens
  misc_feature: 705 for SV(C|O) and mtDNA
cacctgagttgtaaaaaactccagctgacacaaaatagactacgaaagtggctttaacatatctgaacacacaatagctaagacccaaactgggattagataccccactatgcttagccc

SEQ ID NO: 72375 - DNA, 120 bp, Homo sapiens; identical to SEQ ID NO: 58484
  misc_feature: 705 for SV(C|O) and mtDNA

SEQ ID NO: 72376 - DNA, 120 bp, Homo sapiens
  misc_feature: 705 for SV(C|O) and mtDNA
ctcacctgagttgtaaaaaactccagctgacacaaaatagactacgaaagtggctttaacatatctgaacacacaatagctaagacccaaactgggattagataccccactatgcttagc

SEQ ID NO: 72377 - DNA, 120 bp, Homo sapiens
  misc_feature: 705 for SV(C|O) and mtDNA
cacgcaagcaaccgcatccataatccttctaatagctatcctcttcaacaatatactctccggacaatgaaccataaccaatactaccaatcaatactcatcattaataatcataatggc

SEQ ID NO: 72378 - DNA, 120 bp, Homo sapiens; identical to SEQ ID NO: 52334
  misc_feature: 705 for SV(C|O) and mtDNA

SEQ ID NO: 72379 - DNA, 120 bp, Homo sapiens
  misc_feature: 705 for SV(C|O) and mtDNA
gagttagcagttcttgtgagctttctcggtaaataaggggtcgtaagcctctgttgtcagattcacaatctgatgttttggttaaactatatttacaagaggaaaacccggtaatgatgt

SEQ ID NO: 72380 - DNA, 120 bp, Homo sapiens; identical to SEQ ID NO: 52244
  misc_feature: 705 for SV(C|O) and mtDNA

SEQ ID NO: 72381 - DNA, 120 bp, Homo sapiens; identical to SEQ ID NO: 61785
  misc_feature: 705 for SV(C|O) and mtDNA

SEQ ID NO: 72382 - DNA, 120 bp, Homo sapiens
  misc_feature: 705 for SV(C|O) and mtDNA
gaagatataaaatatgattagttctgtggctgtgaatgttataattaaggagatttgtagggagattagtatagagaggtagagtttttttcgtgatagtggttcactggataagtggcg

SEQ ID NO: 72383 - DNA, 120 bp, Homo sapiens
  misc_feature: 705 for SV(C|O) and mtDNA
gaagaactgattaatgtttgggtctgagtttatatatcacagtgagaattctatgatggaccatgtaacgaataatgctacagggatgaatattatggagaagtagtctagtttgaagct

SEQ ID NO: 72384 - DNA, 120 bp, Homo sapiens; identical to SEQ ID NO: 55395
  misc_feature: 705 for SV(C|O) and mtDNA

SEQ ID NO: 72385 - DNA, 120 bp, Homo sapiens; identical to SEQ ID NO: 60143
  misc_feature: 705 for SV(C|O) and mtDNA

SEQ ID NO: 72386 - DNA, 120 bp, Homo sapiens
  misc_feature: 705 for SV(C|O) and mtDNA
ctagcccacttcttaccacaaggcacacctacaccccttatccccatactagttattatcgaaaccatcagcctactcattcaaccaatagccctggccgtacgcctaaccgctaacatt

SEQ ID NO: 72387 - DNA, 120 bp, Homo sapiens
  misc_feature: 705 for SV(C|O) and mtDNA
accacacattcgaagaacccgtatacataaaatctagacaaaaaaggaaggaatcgaaccccccaaagctggtttcaagccaaccccatggcctccatgactttttcaaaaaggtattag

SEQ ID NO: 72388 - DNA, 120 bp, Homo sapiens; identical to SEQ ID NO: 58693
  misc_feature: 705 for SV(C|O) and mtDNA

SEQ ID NO: 72389 - DNA, 120 bp, Homo sapiens
  misc_feature: 705 for SV(C|O) and mtDNA
cctgtggtgatttggaggatcaggcaggcgccaaggagtgagccgaagtttcatcatgcggagatgttggatggggtggggaggtcgatgaatgagtggttaattaattttattaggggg

SEQ ID NO: 72390 - DNA, 120 bp, Homo sapiens; identical to SEQ ID NO: 56955
  misc_feature: 705 for SV(C|O) and mtDNA

SEQ ID NO: 72391 - DNA, 120 bp, Homo sapiens
  misc_feature: 705 for SV(C|O) and mtDNA
aactgattaatgtttgggtctgagtttatatatcacagtgagaattctatgatggaccatgtaacgaataatgctacagggatgaatattatggagaagtagtctagtttgaagcttagg

SEQ ID NO: 72392 - DNA, 120 bp, Homo sapiens
  misc_feature: 705 for SV(C|O) and mtDNA
agtccgtgggcgattatgagaatgactgcgccggtgaagcttcagggggtttggatgagaatggctgttactacgagggctatgtggctgattgaagagtatgcaatgagcgattttagg

SEQ ID NO: 72393 - DNA, 120 bp, Homo sapiens
  misc_feature: 705 for SV(C|O) and mtDNA
ccataattacccccatactccttacactattcctcatcacccaactaaaaatattaaacacaaactaccacctacctccctcaccaaagcccataaaaataaaaaattataacaaaccct

SEQ ID NO: 72394 - DNA, 120 bp, Homo sapiens
  misc_feature: 705 for SV(C|O) and mtDNA
ccaacatctccgcatgatgaaacttcggctcactccttggcgcctgcctgatcctccaaatcaccacaggactattcctagccatgcactactcaccagacgcctcaaccgccttttcat

SEQ ID NO: 72395 - DNA, 120 bp, Homo sapiens
  misc_feature: 705 for SV(C|O) and mtDNA
cactcgtaaggggtggatttttctatgtagccgttgagttgtggtagtcaaaatgtaataattattagtagtaaggctaggagggtgttgattattaaaattaaggcgaagtttattact

SEQ ID NO: 72396 - DNA, 120 bp, Homo sapiens
  misc_feature: 705 for SV(C|O) and mtDNA
cacattttatttctccaacatactcggattctaccctaccatcacacaccgcacaatcccctatctaggccttcttacgagccaaaacctgcccctactcctcctagacctaacctgact

SEQ ID NO: 72397 - DNA, 120 bp, Homo sapiens; identical to SEQ ID NO: 55136
  misc_feature: 705 for SV(C|O) and mtDNA

SEQ ID NO: 72398 - DNA, 120 bp, Homo sapiens; identical to SEQ ID NO: 56684
  misc_feature: 705 for SV(C|O) and mtDNA

SEQ ID NO: 72399 - DNA, 120 bp, Homo sapiens
  misc_feature: 704 for SV(C|O) and mtDNA
aaaaattttggtgcaactccaaataaaagtaacaaccatgcacactactataaccaccctaaccctgacttccctaattccccccatccttaccaccctcgttaaccctaacaaaaaaaa

SEQ ID NO: 72400 - DNA, 120 bp, Homo sapiens
  misc_feature: 704 for SV(C|O) and mtDNA
cacattcgaagaacccgtatacataaaatctagacaaaaaaggaaggaatcgaaccccccaaagctggtttcaagccaaccccatggcctccatgactttttcaaaaaggtattagaaaa

SEQ ID NO: 72401 - DNA, 120 bp, Homo sapiens; identical to SEQ ID NO: 61432
  misc_feature: 704 for SV(C|O) and mtDNA

SEQ ID NO: 72402 - DNA, 120 bp, Homo sapiens
  misc_feature: 704 for SV(C|O) and mtDNA
ttatgtcctacaagcattaattaattaacacactttagtaagtatgttcgtctgtaatattgaacgtaggtgcgataaataataggatgaggcaggaatcaaagacagatactgcgacat

SEQ ID NO: 72403 - DNA, 120 bp, Homo sapiens; identical to SEQ ID NO: 55060
  misc_feature: 704 for SV(C|O) and mtDNA

SEQ ID NO: 72404 - DNA, 120 bp, Homo sapiens; identical to SEQ ID NO: 53869
  misc_feature: 704 for SV(C|O) and mtDNA

SEQ ID NO: 72405 - DNA, 120 bp, Homo sapiens
  misc_feature: 704 for SV(C|O) and mtDNA
tgtactacaggtggtcaagtatttatggtaccgtacaatattcatggtggctggcagtaatgtacgaattacatagcggttgttgatgggtgagtcaatacttgggtggcacccaaatct

SEQ ID NO: 72406 - DNA, 120 bp, Homo sapiens
  misc_feature: 704 for SV(C|O) and mtDNA
tgtaacgaataatgctacagggatgaatattatggagaagtagtctagtttgaagcttagggagagctgggttgtttgggttgtggctcagtgtcagttcgagataataacttcttggtc

SEQ ID NO: 72407 - DNA, 120 bp, Homo sapiens
  misc_feature: 704 for SV(C|O) and mtDNA
cagtactgatcattctatttccccctctattgatccccacctccaaatatctcatcaacaaccgactaatcaccacccaacaatgactaatcaaactaacctcaaaacaaatgataacca

SEQ ID NO: 72408 - DNA, 120 bp, Homo sapiens
  misc_feature: 704 for SV(C|O) and mtDNA
acccctaacaggggccctctcagccctcctaatgacctccggcctagccatgtgatttcacttccactccataacgctcctcatactaggcctactaaccaacacactaaccatatacca

SEQ ID NO: 72409 - DNA, 120 bp, Homo sapiens
  misc_feature: 704 for SV(C|O) and mtDNA
tggcttagtgggcgaaatattatgctttgttgtttggatatatggaggatggggattattgctaggatgaggatggatagtaatagggcaaggacgcctcctagtttgttagggacggat

SEQ ID NO: 72410 - DNA, 120 bp, Homo sapiens; identical to SEQ ID NO: 53049
  misc_feature: 704 for SV(C|O) and mtDNA

SEQ ID NO: 72411 - DNA, 120 bp, Homo sapiens; identical to SEQ ID NO: 58015
  misc_feature: 704 for SV(C|O) and mtDNA

SEQ ID NO: 72412 - DNA, 120 bp, Homo sapiens
  misc_feature: 704 for SV(C|O) and mtDNA
gccttttaccactccagcctagcccctaccccccaattaggagggcactggcccccaacaggcatcaccccgctaaatcccctagaagtcccactcctaaacacatccgtattactcgca

SEQ ID NO: 72413 - DNA, 120 bp, Homo sapiens; identical to SEQ ID NO: 57326
  misc_feature: 704 for SV(C|O) and mtDNA

SEQ ID NO: 72414 - DNA, 120 bp, Homo sapiens; identical to SEQ ID NO: 60213
  misc_feature: 704 for SV(C|O) and mtDNA

SEQ ID NO: 72415 - DNA, 120 bp, Homo sapiens
  misc_feature: 704 for SV(C|O) and mtDNA
tcagaagcttatgttgtttatgcggggaaacgccatatcgggggcaccgattattaggggaactagtcagttgccaaagcctccgattatgatgggtattactatgaagaagattattac

SEQ ID NO: 72416 - DNA, 120 bp, Homo sapiens
  misc_feature: 704 for SV(C|O) and mtDNA
tcacctgagttgtaaaaaactccagctgacacaaaatagactacgaaagtggctttaacatatctgaacacacaatagctaagacccaaactgggattagataccccactatgcttagcc

SEQ ID NO: 72417 - DNA, 120 bp, Homo sapiens
  misc_feature: 704 for SV(C|O) and mtDNA
tatgcggaggagaatgttttcatgttacttatactaacattagttcttctatagggtgatagattggtccaattgggtgtgaggagttcagttatatgtttgggattttttaggtagtgg

SEQ ID NO: 72418 - DNA, 120 bp, Homo sapiens; identical to SEQ ID NO: 56290
  misc_feature: 704 for SV(C|O) and mtDNA

SEQ ID NO: 72419 - DNA, 120 bp, Homo sapiens; identical to SEQ ID NO: 54862
  misc_feature: 704 for SV(C|O) and mtDNA

SEQ ID NO: 72420 - DNA, 120 bp, Homo sapiens
  misc_feature: 704 for SV(C|O) and mtDNA
tagactacttctccataatattcatccctgtagcattattcgttacatggtccatcatagaattctcactgtgatatataaactcagacccaaacattaatcagttcttcaaatatctac

SEQ ID NO: 72421 - DNA, 120 bp, Homo sapiens
  misc_feature: 704 for SV(C|O) and mtDNA
aaaattttggtgcaactccaaataaaagtaacaaccatgcacactactataaccaccctaaccctgacttccctaattccccccatccttaccaccctcgttaaccctaacaaaaaaaac

SEQ ID NO: 72422 - DNA, 120 bp, Homo sapiens
  misc_feature: 704 for SV(C|O) and mtDNA
gtggctgcttttaggcctactatgggtgttaaattttttactctctctacaaggttttttcctagtgtccaaagagctgttcctctttggactaacagttaaatttacaaggggatttag

SEQ ID NO: 72423 - DNA, 120 bp, Homo sapiens
  misc_feature: 704 for SV(C|O) and mtDNA
gtcttaggccccaaaaattttggtgcaactccaaataaaagtaacaaccatgcacactactataaccaccctaaccctgacttccctaattccccccatccttaccaccctcgttaaccc

SEQ ID NO: 72424 - DNA, 120 bp, Homo sapiens
  misc_feature: 704 for SV(C|O) and mtDNA
attcgtacattactgccagccaccatgaatattgtacggtaccataaatacttgaccacctgtagtacataaaaacccaatccacatcaaaaccccctccccatgcttacaagcaagtac

SEQ ID NO: 72425 - DNA, 120 bp, Homo sapiens; identical to SEQ ID NO: 60521
  misc_feature: 704 for SV(C|O) and mtDNA

SEQ ID NO: 72426 - DNA, 120 bp, Homo sapiens
  misc_feature: 704 for SV(C|O) and mtDNA
ggatcaggacatcccgatggtgcagccgctattaaaggttcgtttgttcaacgattaaagtcctacgtgatctgagttcagaccggagtaatccaggtcggtttctatctacttcaaatt

SEQ ID NO: 72427 - DNA, 120 bp, Homo sapiens
  misc_feature: 704 for SV(C|O) and mtDNA
gctaggatgaggatggatagtaatagggcaaggacgcctcctagtttgttagggacggatcggagaattgtgtaggcgaataggaaatatcattcgggcttgatgtggggaggggtgttt

SEQ ID NO: 72428 - DNA, 120 bp, Homo sapiens; identical to SEQ ID NO: 53402
  misc_feature: 704 for SV(C|O) and mtDNA

SEQ ID NO: 72429 - DNA, 120 bp, Homo sapiens; identical to SEQ ID NO: 55131
  misc_feature: 704 for SV(C|O) and mtDNA

SEQ ID NO: 72430 - DNA, 120 bp, Homo sapiens
  misc_feature: 704 for SV(C|O) and mtDNA
aagtagatagaaaccgacctggattactccggtctgaactcagatcacgtaggactttaatcgttgaacaaacgaacctttaatagcggctgcaccatcgggatgtcctgatccaacatc

SEQ ID NO: 72431 - DNA, 120 bp, Homo sapiens
  misc_feature: 704 for SV(C|O) and mtDNA
gatcaggacatcccgatggtgcagccgctattaaaggttcgtttgttcaacgattaaagtcctacgtgatctgagttcagaccggagtaatccaggtcggtttctatctacttcaaattc

SEQ ID NO: 72432 - DNA, 120 bp, Homo sapiens; identical to SEQ ID NO: 60038
  misc_feature: 704 for SV(C|O) and mtDNA

SEQ ID NO: 72433 - DNA, 120 bp, Homo sapiens; identical to SEQ ID NO: 52963
  misc_feature: 704 for SV(C|O) and mtDNA

SEQ ID NO: 72434 - DNA, 120 bp, Homo sapiens; identical to SEQ ID NO: 57503
  misc_feature: 704 for SV(C|O) and mtDNA

SEQ ID NO: 72435 - DNA, 120 bp, Homo sapiens
  misc_feature: 704 for SV(C|O) and mtDNA
aagtccgtgggcgattatgagaatgactgcgccggtgaagcttcagggggtttggatgagaatggctgttactacgagggctatgtggctgattgaagagtatgcaatgagcgattttag

SEQ ID NO: 72436 - DNA, 120 bp, Homo sapiens
  misc_feature: 704 for SV(C|O) and mtDNA
ccatgtaacgaataatgctacagggatgaatattatggagaagtagtctagtttgaagcttagggagagctgggttgtttgggttgtggctcagtgtcagttcgagataataacttcttg

SEQ ID NO: 72437 - DNA, 120 bp, Homo sapiens; identical to SEQ ID NO: 52099
  misc_feature: 704 for SV(C|O) and mtDNA

SEQ ID NO: 72438 - DNA, 120 bp, Homo sapiens; identical to SEQ ID NO: 56005
  misc_feature: 704 for SV(C|O) and mtDNA

SEQ ID NO: 72439 - DNA, 120 bp, Homo sapiens
  misc_feature: 704 for SV(C|O) and mtDNA
aggcttcattcactgatttcccctattctcaggctacaccctagaccaaacctacgccaaaatccatttcactatcatattcatcggcgtaaatctaactttcttcccacaacactttct

SEQ ID NO: 72440 - DNA, 120 bp, Homo sapiens; identical to SEQ ID NO: 55760
  misc_feature: 704 for SV(C|O) and mtDNA

SEQ ID NO: 72441 - DNA, 120 bp, Homo sapiens
  misc_feature: 703 for SV(C|O) and mtDNA
gaagcttatgttgtttatgcggggaaacgccatatcgggggcaccgattattaggggaactagtcagttgccaaagcctccgattatgatgggtattactatgaagaagattattacaaa

SEQ ID NO: 72442 - DNA, 120 bp, Homo sapiens; identical to SEQ ID NO: 61218
  misc_feature: 703 for SV(C|O) and mtDNA

SEQ ID NO: 72443 - DNA, 120 bp, Homo sapiens
  misc_feature: 703 for SV(C|O) and mtDNA
tttaccaaaaacatcacctctagcatcaccagtattagaggcaccgcctgcccagtgacacatgtttaacggccgcggtaccctaaccgtgcaaaggtagcataatcacttgttccttaa

SEQ ID NO: 72444 - DNA, 120 bp, Homo sapiens; identical to SEQ ID NO: 58520
  misc_feature: 703 for SV(C|O) and mtDNA

SEQ ID NO: 72445 - DNA, 120 bp, Homo sapiens
  misc_feature: 703 for SV(C|O) and mtDNA
agttgtatatagcctagaatttttcgttcggtaagcattaggaatgccattgcgattagaatgggtacaatgaggagtaggaggttggccatgggtatgttgttaagaagaggaattgaa

SEQ ID NO: 72446 - DNA, 120 bp, Homo sapiens
  misc_feature: 703 for SV(C|O) and mtDNA
catctacggctcaacattttttgtagccacaggcttccacggacttcacgtcattattggctcaactttcctcactatctgcttcatccgccaactaatatttcactttacatccaaaca

SEQ ID NO: 72447 - DNA, 120 bp, Homo sapiens
  misc_feature: 703 for SV(C|O) and mtDNA
tgttgttaagaagaggaattgaacctctgactgtaaagttttaagttttatgcgattaccgggctctgccatcttaacaaaccctgttcttgggtgggtgtgggtataatactaagttga

SEQ ID NO: 72448 - DNA, 120 bp, Homo sapiens; identical to SEQ ID NO: 56968
  misc_feature: 703 for SV(C|O) and mtDNA

SEQ ID NO: 72449 - DNA, 120 bp, Homo sapiens; identical to SEQ ID NO: 58139
  misc_feature: 703 for SV(C|O) and mtDNA

SEQ ID NO: 72450 - DNA, 120 bp, Homo sapiens
  misc_feature: 703 for SV(C|O) and mtDNA
tggtattaggattaggattgttgtgaagtatagtacggatgctacttgtccaatgatggtaaaagggtagcttactggttgtcctccgattcaggttagaatgaggaggtctgcggctag

SEQ ID NO: 72451 - DNA, 120 bp, Homo sapiens; identical to SEQ ID NO: 55827
  misc_feature: 703 for SV(C|O) and mtDNA

SEQ ID NO: 72452 - DNA, 120 bp, Homo sapiens
  misc_feature: 703 for SV(C|O) and mtDNA
tgccgtcggaaatggtgaagggagactcgaagtactctgaggcttgtaggagggtaaaatagagacccagtaaaattgtaataagcagtgcttgaattatttggtttcggttgttttcta

SEQ ID NO: 72453 - DNA, 120 bp, Homo sapiens
  misc_feature: 703 for SV(C|O) and mtDNA
cacacctacaccccttatccccatactagttattatcgaaaccatcagcctactcattcaaccaatagccctggccgtacgcctaaccgctaacattactgcaggccacctactcatgca

SEQ ID NO: 72454 - DNA, 120 bp, Homo sapiens; identical to SEQ ID NO: 55484
  misc_feature: 703 for SV(C|O) and mtDNA

SEQ ID NO: 72455 - DNA, 120 bp, Homo sapiens; identical to SEQ ID NO: 61473
  misc_feature: 703 for SV(C|O) and mtDNA

SEQ ID NO: 72456 - DNA, 120 bp, Homo sapiens; identical to SEQ ID NO: 58338
  misc_feature: 703 for SV(C|O) and mtDNA

SEQ ID NO: 72457 - DNA, 120 bp, Homo sapiens; identical to SEQ ID NO: 54726
  misc_feature: 703 for SV(C|O) and mtDNA

SEQ ID NO: 72458 - DNA, 120 bp, Homo sapiens
  misc_feature: 703 for SV(C|O) and mtDNA
ctgattaatgtttgggtctgagtttatatatcacagtgagaattctatgatggaccatgtaacgaataatgctacagggatgaatattatggagaagtagtctagtttgaagcttaggga

SEQ ID NO: 72459 - DNA, 120 bp, Homo sapiens; identical to SEQ ID NO: 59256
  misc_feature: 703 for SV(C|O) and mtDNA

SEQ ID NO: 72460 - DNA, 120 bp, Homo sapiens
  misc_feature: 703 for SV(C|O) and mtDNA
tatcaataggagctgtatttgccatcataggaggcttcattcactgatttcccctattctcaggctacaccctagaccaaacctacgccaaaatccatttcactatcatattcatcggcg

SEQ ID NO: 72461 - DNA, 120 bp, Homo sapiens
  misc_feature: 703 for SV(C|O) and mtDNA
cttaggccccaaaaattttggtgcaactccaaataaaagtaacaaccatgcacactactataaccaccctaaccctgacttccctaattccccccatccttaccaccctcgttaacccta

SEQ ID NO: 72462 - DNA, 120 bp, Homo sapiens
  misc_feature: 703 for SV(C|O) and mtDNA
gctattaccttcttattatttgatctagaaattgccctccttttacccctaccatgagccctacaaacaactaacctaccactaatagttatgtcatccctcttattaatcatcatccta

SEQ ID NO: 72463 - DNA, 120 bp, Homo sapiens
  misc_feature: 703 for SV(C|O) and mtDNA
tagatagaaaccgacctggattactccggtctgaactcagatcacgtaggactttaatcgttgaacaaacgaacctttaatagcggctgcaccatcgggatgtcctgatccaacatcgag

SEQ ID NO: 72464 - DNA, 120 bp, Homo sapiens
  misc_feature: 703 for SV(C|O) and mtDNA
tactgatcattctatttccccctctattgatccccacctccaaatatctcatcaacaaccgactaatcaccacccaacaatgactaatcaaactaacctcaaaacaaatgataaccatac

SEQ ID NO: 72465 - DNA, 120 bp, Homo sapiens; identical to SEQ ID NO: 58498
  misc_feature: 703 for SV(C|O) and mtDNA

SEQ ID NO: 72466 - DNA, 120 bp, Homo sapiens
  misc_feature: 703 for SV(C|O) and mtDNA
ggccatatgtgttggagattgagactagtagggctaggcccaccgctgcttcgcaggcggcaaagactagtatggcaataggcacaatattggctaagagggagtgggtgttgagggtta

SEQ ID NO: 72467 - DNA, 120 bp, Homo sapiens; identical to SEQ ID NO: 51993
  misc_feature: 703 for SV(C|O) and mtDNA

SEQ ID NO: 72468 - DNA, 120 bp, Homo sapiens
  misc_feature: 703 for SV(C|O) and mtDNA
cactaaaacactcaccaagacctcaacccctgacccccatgcctcaggatactcctcaatagccatcgctgtagtatatccaaagacaaccatcattccccctaaataaattaaaaaaac

SEQ ID NO: 72469 - DNA, 120 bp, Homo sapiens
  misc_feature: 703 for SV(C|O) and mtDNA
accctatagaagaactaatgttagtataagtaacatgaaaacattctcctccgcataagcctgcgtcagattaaaacactgaactgacaattaacagcccaatatctacaatcaaccaac

SEQ ID NO: 72470 - DNA, 120 bp, Homo sapiens
  misc_feature: 703 for SV(C|O) and mtDNA
caaccacccaactatctataaacctagccatggccatccccttatgagcgggcgcagtgattataggctttcgctctaagattaaaaatgccctagcccacttcttaccacaaggcacac

SEQ ID NO: 72471 - DNA, 120 bp, Homo sapiens
  misc_feature: 703 for SV(C|O) and mtDNA
aggacaaatcagagaaaaagtctttaactccaccattagcacccaaagctaagattctaatttaaactattctctgttctttcatggggaagcagatttgggtgccacccaagtattgac

SEQ ID NO: 72472 - DNA, 120 bp, Homo sapiens; identical to SEQ ID NO: 55577
  misc_feature: 703 for SV(C|O) and mtDNA

SEQ ID NO: 72473 - DNA, 120 bp, Homo sapiens
  misc_feature: 703 for SV(C|O) and mtDNA
ccatactagttattatcgaaaccatcagcctactcattcaaccaatagccctggccgtacgcctaaccgctaacattactgcaggccacctactcatgcacctaattggaagcgccaccc

SEQ ID NO: 72474 - DNA, 120 bp, Homo sapiens
  misc_feature: 703 for SV(C|O) and mtDNA
ccataaacctggagtgactatatggatgccccccaccctaccacacattcgaagaacccgtatacataaaatctagacaaaaaaggaaggaatcgaaccccccaaagctggtttcaagcc

SEQ ID NO: 72475 - DNA, 120 bp, Homo sapiens
  misc_feature: 703 for SV(C|O) and mtDNA
accccatccaacatctccgcatgatgaaacttcggctcactccttggcgcctgcctgatcctccaaatcaccacaggactattcctagccatgcactactcaccagacgcctcaaccgcc

SEQ ID NO: 72476 - DNA, 120 bp, Homo sapiens; identical to SEQ ID NO: 55725
  misc_feature: 703 for SV(C|O) and mtDNA

SEQ ID NO: 72477 - DNA, 120 bp, Homo sapiens; identical to SEQ ID NO: 52524
  misc_feature: 703 for SV(C|O) and mtDNA

SEQ ID NO: 72478 - DNA, 120 bp, Homo sapiens
  misc_feature: 703 for SV(C|O) and mtDNA
atagtggggtatctaatcccagtttgggtcttagctattgtgtgttcagatatgttaaagccactttcgtagtctattttgtgtcagctggagttttttacaactcaggtgagttttagc

SEQ ID NO: 72479 - DNA, 120 bp, Homo sapiens
  misc_feature: 703 for SV(C|O) and mtDNA
gaggagaatgttttcatgttacttatactaacattagttcttctatagggtgatagattggtccaattgggtgtgaggagttcagttatatgtttgggattttttaggtagtgggtgttg

SEQ ID NO: 72480 - DNA, 120 bp, Homo sapiens
  misc_feature: 703 for SV(C|O) and mtDNA
ctaccccccaattaggagggcactggcccccaacaggcatcaccccgctaaatcccctagaagtcccactcctaaacacatccgtattactcgcatcaggagtatcaatcacctgagctc

SEQ ID NO: 72481 - DNA, 120 bp, Homo sapiens
  misc_feature: 703 for SV(C|O) and mtDNA
gagcaccctatgtcgcagtatctgtctttgattcctgcctcatcctattatttatcgcacctacgttcaatattacagacgaacatacttactaaagtgtgttaattaattaatgcttgt

SEQ ID NO: 72482 - DNA, 120 bp, Homo sapiens; identical to SEQ ID NO: 55329
  misc_feature: 703 for SV(C|O) and mtDNA

SEQ ID NO: 72483 - DNA, 120 bp, Homo sapiens
  misc_feature: 703 for SV(C|O) and mtDNA
ctcatcactagacatcgtactacacgacacgtactacgttgtagctcacttccactatgtcctatcaataggagctgtatttgccatcataggaggcttcattcactgatttcccctatt

SEQ ID NO: 72484 - DNA, 120 bp, Homo sapiens
  misc_feature: 703 for SV(C|O) and mtDNA
agtagatagaaaccgacctggattactccggtctgaactcagatcacgtaggactttaatcgttgaacaaacgaacctttaatagcggctgcaccatcgggatgtcctgatccaacatcg

SEQ ID NO: 72485 - DNA, 120 bp, Homo sapiens
  misc_feature: 703 for SV(C|O) and mtDNA
ccttttaccactccagcctagcccctaccccccaattaggagggcactggcccccaacaggcatcaccccgctaaatcccctagaagtcccactcctaaacacatccgtattactcgcat

SEQ ID NO: 72486 - DNA, 120 bp, Homo sapiens; identical to SEQ ID NO: 56721
  misc_feature: 703 for SV(C|O) and mtDNA

SEQ ID NO: 72487 - DNA, 120 bp, Homo sapiens
  misc_feature: 703 for SV(C|O) and mtDNA
agaagaggaattgaacctctgactgtaaagttttaagttttatgcgattaccgggctctgccatcttaacaaaccctgttcttgggtgggtgtgggtataatactaagttgagatgatat

SEQ ID NO: 72488 - DNA, 120 bp, Homo sapiens
  misc_feature: 702 for SV(C|O) and mtDNA
tttgagggggaatgctggagattgtaatgggtatggagacatatcatataagtaatgctagggtgagtggtaggaagttttttcataggaggtgtatgagttggtcgtagcggaatcggg

SEQ ID NO: 72489 - DNA, 120 bp, Homo sapiens
  misc_feature: 702 for SV(C|O) and mtDNA
tttagggagtcataagtggagtccgtaaagaggtatctttactataaaagctattgtgtaagctagtcatattaagttgttggctcaggagtttgatagttcttgggcagtgagagtgag

SEQ ID NO: 72490 - DNA, 120 bp, Homo sapiens; identical to SEQ ID NO: 56246
  misc_feature: 702 for SV(C|O) and mtDNA

SEQ ID NO: 72491 - DNA, 120 bp, Homo sapiens; identical to SEQ ID NO: 52202
  misc_feature: 702 for SV(C|O) and mtDNA

SEQ ID NO: 72492 - DNA, 120 bp, Homo sapiens
  misc_feature: 702 for SV(C|O) and mtDNA
ttggtattaggattaggattgttgtgaagtatagtacggatgctacttgtccaatgatggtaaaagggtagcttactggttgtcctccgattcaggttagaatgaggaggtctgcggcta

SEQ ID NO: 72493 - DNA, 120 bp, Homo sapiens
  misc_feature: 702 for SV(C|O) and mtDNA
ttggggaacagctaaataggttgttgttgatttggttaaaaaatagtagagggatgatgctaataattaggctgtgggtggttgtgttgattcaaattatgtgttttttggaaagtcatg

SEQ ID NO: 72494 - DNA, 120 bp, Homo sapiens
  misc_feature: 702 for SV(C|O) and mtDNA
ttataaccaagcataatacagcaaggactaacccctataccttctgcataatgaattaactagaaataactttgcaaggagagccaaagctaagacccccgaaaccagacgagctaccta

SEQ ID NO: 72495 - DNA, 120 bp, Homo sapiens
  misc_feature: 702 for SV(C|O) and mtDNA
tggagccggagcaccctatgtcgcagtatctgtctttgattcctgcctcatcctattatttatcgcacctacgttcaatattacagacgaacatacttactaaagtgtgttaattaatta

SEQ ID NO: 72496 - DNA, 120 bp, Homo sapiens
  misc_feature: 702 for SV(C|O) and mtDNA
tcattcacacgagaaaacaccctcatgttcatacacctatcccccattctcctcctatccctcaaccccgacatcattaccgggttttcctcttgtaaatatagtttaaccaaaacatca

SEQ ID NO: 72497 - DNA, 120 bp, Homo sapiens
  misc_feature: 702 for SV(C|O) and mtDNA
tgagttagcagttcttgtgagctttctcggtaaataaggggtcgtaagcctctgttgtcagattcacaatctgatgttttggttaaactatatttacaagaggaaaacccggtaatgatg

SEQ ID NO: 72498 - DNA, 120 bp, Homo sapiens; identical to SEQ ID NO: 57862
  misc_feature: 702 for SV(C|O) and mtDNA

SEQ ID NO: 72499 - DNA, 120 bp, Homo sapiens; identical to SEQ ID NO: 58587
  misc_feature: 702 for SV(C|O) and mtDNA

SEQ ID NO: 72500 - DNA, 120 bp, Homo sapiens
  misc_feature: 702 for SV(C|O) and mtDNA
tctaggccatatgtgttggagattgagactagtagggctaggcccaccgctgcttcgcaggcggcaaagactagtatggcaataggcacaatattggctaagagggagtgggtgttgagg

SEQ ID NO: 72501 - DNA, 120 bp, Homo sapiens; identical to SEQ ID NO: 58106
  misc_feature: 702 for SV(C|O) and mtDNA

SEQ ID NO: 72502 - DNA, 120 bp, Homo sapiens
  misc_feature: 702 for SV(C|O) and mtDNA
tatccattggtcttaggccccaaaaattttggtgcaactccaaataaaagtaacaaccatgcacactactataaccaccctaaccctgacttccctaattccccccatccttaccaccct

SEQ ID NO: 72503 - DNA, 120 bp, Homo sapiens
  misc_feature: 702 for SV(C|O) and mtDNA
aagggagcctactagggtgtagaataggaagtatgtgcctgcgttcaggcgttctggctggttgcctcatcgggtgatgatagccaaggtggggataagtgtggtttcgaagaagatata

SEQ ID NO: 72504 - DNA, 120 bp, Homo sapiens; identical to SEQ ID NO: 55704
  misc_feature: 702 for SV(C|O) and mtDNA

SEQ ID NO: 72505 - DNA, 120 bp, Homo sapiens; identical to SEQ ID NO: 55237
  misc_feature: 702 for SV(C|O) and mtDNA

SEQ ID NO: 72506 - DNA, 120 bp, Homo sapiens
  misc_feature: 702 for SV(C|O) and mtDNA
tacttgcttgtaagcatggggagggggttttgatgtggattgggtttttatgtactacaggtggtcaagtatttatggtaccgtacaatattcatggtggctggcagtaatgtacgaatt

SEQ ID NO: 72507 - DNA, 120 bp, Homo sapiens
  misc_feature: 702 for SV(C|O) and mtDNA
gtgttggagattgagactagtagggctaggcccaccgctgcttcgcaggcggcaaagactagtatggcaataggcacaatattggctaagagggagtgggtgttgagggttatgagagta

SEQ ID NO: 72508 - DNA, 120 bp, Homo sapiens
  misc_feature: 702 for SV(C|O) and mtDNA
taccacacattcgaagaacccgtatacataaaatctagacaaaaaaggaaggaatcgaaccccccaaagctggtttcaagccaaccccatggcctccatgactttttcaaaaaggtatta

SEQ ID NO: 72509 - DNA, 120 bp, Homo sapiens; identical to SEQ ID NO: 53689
  misc_feature: 702 for SV(C|O) and mtDNA

SEQ ID NO: 72510 - DNA, 120 bp, Homo sapiens; identical to SEQ ID NO: 55944
  misc_feature: 702 for SV(C|O) and mtDNA

SEQ ID NO: 72511 - DNA, 120 bp, Homo sapiens
  misc_feature: 702 for SV(C|O) and mtDNA
cgcactcgtaaggggtggatttttctatgtagccgttgagttgtggtagtcaaaatgtaataattattagtagtaaggctaggagggtgttgattattaaaattaaggcgaagtttatta

SEQ ID NO: 72512 - DNA, 120 bp, Homo sapiens
  misc_feature: 702 for SV(C|O) and mtDNA
gtttgagggggaatgctggagattgtaatgggtatggagacatatcatataagtaatgctagggtgagtggtaggaagttttttcataggaggtgtatgagttggtcgtagcggaatcgg

SEQ ID NO: 72513 - DNA, 120 bp, Homo sapiens; identical to SEQ ID NO: 52156
  misc_feature: 702 for SV(C|O) and mtDNA

SEQ ID NO: 72514 - DNA, 120 bp, Homo sapiens
  misc_feature: 702 for SV(C|O) and mtDNA
atggggctcactcacccaccacattaacaacataaaaccctcattcacacgagaaaacaccctcatgttcatacacctatcccccattctcctcctatccctcaaccccgacatcattac

SEQ ID NO: 72515 - DNA, 120 bp, Homo sapiens; identical to SEQ ID NO: 61212
  misc_feature: 702 for SV(C|O) and mtDNA

SEQ ID NO: 72516 - DNA, 120 bp, Homo sapiens
  misc_feature: 702 for SV(C|O) and mtDNA
accataattacccccatactccttacactattcctcatcacccaactaaaaatattaaacacaaactaccacctacctccctcaccaaagcccataaaaataaaaaattataacaaaccc

SEQ ID NO: 72517 - DNA, 120 bp, Homo sapiens
  misc_feature: 702 for SV(C|O) and mtDNA
gaactatcaaactcctgagccaacaacttaatatgactagcttacacaatagcttttatagtaaagatacctctttacggactccacttatgactccctaaagcccatgtcgaagccccc

SEQ ID NO: 72518 - DNA, 120 bp, Homo sapiens; identical to SEQ ID NO: 52558
  misc_feature: 702 for SV(C|O) and mtDNA

SEQ ID NO: 72519 - DNA, 120 bp, Homo sapiens; identical to SEQ ID NO: 55650
  misc_feature: 702 for SV(C|O) and mtDNA

SEQ ID NO: 72520 - DNA, 120 bp, Homo sapiens
  misc_feature: 702 for SV(C|O) and mtDNA
catagcacattacagtcaaatcccttctcgtccccatggatgacccccctcagataggggtcccttgaccaccatcctccgtgaaatcaatatcccgcacaagagtgctactctcctcgc

SEQ ID NO: 72521 - DNA, 120 bp, Homo sapiens; identical to SEQ ID NO: 57976
  misc_feature: 702 for SV(C|O) and mtDNA

SEQ ID NO: 72522 - DNA, 120 bp, Homo sapiens
  misc_feature: 702 for SV(C|O) and mtDNA
gaagtagatagaaaccgacctggattactccggtctgaactcagatcacgtaggactttaatcgttgaacaaacgaacctttaatagcggctgcaccatcgggatgtcctgatccaacat

SEQ ID NO: 72523 - DNA, 120 bp, Homo sapiens
  misc_feature: 702 for SV(C|O) and mtDNA
gaagggagcctactagggtgtagaataggaagtatgtgcctgcgttcaggcgttctggctggttgcctcatcgggtgatgatagccaaggtggggataagtgtggtttcgaagaagatat

SEQ ID NO: 72524 - DNA, 120 bp, Homo sapiens
  misc_feature: 702 for SV(C|O) and mtDNA
cccaagaactatcaaactcctgagccaacaacttaatatgactagcttacacaatagcttttatagtaaagatacctctttacggactccacttatgactccctaaagcccatgtcgaag

SEQ ID NO: 72525 - DNA, 120 bp, Homo sapiens
  misc_feature: 702 for SV(C|O) and mtDNA
ctgtaatgtgctatgtacggtaaatggctttatgtactatgtgctgttaagggtgagtaggtttgttggtatcctagtgggtgaggggtggctttggagttgcagttgatgtgtgatagt

SEQ ID NO: 72526 - DNA, 120 bp, Homo sapiens; identical to SEQ ID NO: 60080
  misc_feature: 702 for SV(C|O) and mtDNA

SEQ ID NO: 72527 - DNA, 120 bp, Homo sapiens
  misc_feature: 702 for SV(C|O) and mtDNA
ctaggccatatgtgttggagattgagactagtagggctaggcccaccgctgcttcgcaggcggcaaagactagtatggcaataggcacaatattggctaagagggagtgggtgttgaggg

SEQ ID NO: 72528 - DNA, 120 bp, Homo sapiens; identical to SEQ ID NO: 57283
  misc_feature: 702 for SV(C|O) and mtDNA

SEQ ID NO: 72529 - DNA, 120 bp, Homo sapiens
  misc_feature: 702 for SV(C|O) and mtDNA
cctcgttccacagaagctgccatcaagtatttcctcacgcaagcaaccgcatccataatccttctaatagctatcctcttcaacaatatactctccggacaatgaaccataaccaatact

SEQ ID NO: 72530 - DNA, 120 bp, Homo sapiens
  misc_feature: 702 for SV(C|O) and mtDNA
cccactatgcacattttatttctccaacatactcggattctaccctaccatcacacaccgcacaatcccctatctaggccttcttacgagccaaaacctgcccctactcctcctagacct

SEQ ID NO: 72531 - DNA, 120 bp, Homo sapiens
  misc_feature: 702 for SV(C|O) and mtDNA
caatgaggagtaggaggttggccatgggtatgttgttaagaagaggaattgaacctctgactgtaaagttttaagttttatgcgattaccgggctctgccatcttaacaaaccctgttct

SEQ ID NO: 72532 - DNA, 120 bp, Homo sapiens
  misc_feature: 702 for SV(C|O) and mtDNA
atgttgttaagaagaggaattgaacctctgactgtaaagttttaagttttatgcgattaccgggctctgccatcttaacaaaccctgttcttgggtgggtgtgggtataatactaagttg

SEQ ID NO: 72533 - DNA, 120 bp, Homo sapiens
  misc_feature: 702 for SV(C|O) and mtDNA
aatactagtataccgctcacacctcatatcctccctactatgcctagaaggaataatactatcactgttcattatagctactctcataaccctcaacacccactccctcttagccaatat

SEQ ID NO: 72534 - DNA, 120 bp, Homo sapiens
  misc_feature: 702 for SV(C|O) and mtDNA
actaaaacactcaccaagacctcaacccctgacccccatgcctcaggatactcctcaatagccatcgctgtagtatatccaaagacaaccatcattccccctaaataaattaaaaaaact

SEQ ID NO: 72535 - DNA, 120 bp, Homo sapiens
  misc_feature: 702 for SV(C|O) and mtDNA
accctaccacacattcgaagaacccgtatacataaaatctagacaaaaaaggaaggaatcgaaccccccaaagctggtttcaagccaaccccatggcctccatgactttttcaaaaaggt

SEQ ID NO: 72536 - DNA, 120 bp, Homo sapiens
  misc_feature: 702 for SV(C|O) and mtDNA
acaaaccacaaagacattggaacactatacctattattcggcgcatgagctggagtcctaggcacagctctaagcctccttattcgagccgagctgggccagccaggcaaccttctaggt

SEQ ID NO: 72537 - DNA, 120 bp, Homo sapiens; identical to SEQ ID NO: 53912
  misc_feature: 702 for SV(C|O) and mtDNA

SEQ ID NO: 72538 - DNA, 120 bp, Homo sapiens; identical to SEQ ID NO: 52985
  misc_feature: 701 for SV(C|O) and mtDNA

SEQ ID NO: 72539 - DNA, 120 bp, Homo sapiens
  misc_feature: 701 for SV(C|O) and mtDNA
cacacattcgaagaacccgtatacataaaatctagacaaaaaaggaaggaatcgaaccccccaaagctggtttcaagccaaccccatggcctccatgactttttcaaaaaggtattagaa

SEQ ID NO: 72540 - DNA, 120 bp, Homo sapiens
  misc_feature: 701 for SV(C|O) and mtDNA
actggcccccaacaggcatcaccccgctaaatcccctagaagtcccactcctaaacacatccgtattactcgcatcaggagtatcaatcacctgagctcaccatagtctaatagaaaaca

SEQ ID NO: 72541 - DNA, 120 bp, Homo sapiens
  misc_feature: 701 for SV(C|O) and mtDNA
tggggctcactcacccaccacattaacaacataaaaccctcattcacacgagaaaacaccctcatgttcatacacctatcccccattctcctcctatccctcaaccccgacatcattacc

SEQ ID NO: 72542 - DNA, 120 bp, Homo sapiens; identical to SEQ ID NO: 53498
  misc_feature: 701 for SV(C|O) and mtDNA

SEQ ID NO: 72543 - DNA, 120 bp, Homo sapiens; identical to SEQ ID NO: 52549
  misc_feature: 701 for SV(C|O) and mtDNA

SEQ ID NO: 72544 - DNA, 120 bp, Homo sapiens
  misc_feature: 701 for SV(C|O) and mtDNA
tcgaagcgaaggcttctcaaatcatgaaaattattaatattactgctgttagagaaatgaatgagcctacagatgataggatgtttcatgtggtgtatgcatcggggtagtccgagtaac

SEQ ID NO: 72545 - DNA, 120 bp, Homo sapiens; identical to SEQ ID NO: 57104
  misc_feature: 701 for SV(C|O) and mtDNA

SEQ ID NO: 72546 - DNA, 120 bp, Homo sapiens
  misc_feature: 701 for SV(C|O) and mtDNA
cttttctagtcaggttaggtctaggaggagtaggggcaggttttggctcgtaagaaggcctagataggggattgtgcggtgtgtgatggtagggtagaatccgagtatgttggagaaata

SEQ ID NO: 72547 - DNA, 120 bp, Homo sapiens
  misc_feature: 701 for SV(C|O) and mtDNA
ggggcatgagttagcagttcttgtgagctttctcggtaaataaggggtcgtaagcctctgttgtcagattcacaatctgatgttttggttaaactatatttacaagaggaaaacccggta

SEQ ID NO: 72548 - DNA, 120 bp, Homo sapiens
  misc_feature: 701 for SV(C|O) and mtDNA
taatcataatggctatagcaataaaactaggaatagccccctttcacttctgggtcccagaggttacccaaggcacccctctgacatccggcctgcttcttctcacatgacaaaaactag

SEQ ID NO: 72549 - DNA, 120 bp, Homo sapiens
  misc_feature: 701 for SV(C|O) and mtDNA
taagtccgtgggcgattatgagaatgactgcgccggtgaagcttcagggggtttggatgagaatggctgttactacgagggctatgtggctgattgaagagtatgcaatgagcgatttta

SEQ ID NO: 72550 - DNA, 120 bp, Homo sapiens; identical to SEQ ID NO: 61613
  misc_feature: 701 for SV(C|O) and mtDNA

SEQ ID NO: 72551 - DNA, 120 bp, Homo sapiens
  misc_feature: 701 for SV(C|O) and mtDNA
caacatactcggattctaccctaccatcacacaccgcacaatcccctatctaggccttcttacgagccaaaacctgcccctactcctcctagacctaacctgactagaaaagctattacc

SEQ ID NO: 72552 - DNA, 120 bp, Homo sapiens; identical to SEQ ID NO: 55782
  misc_feature: 701 for SV(C|O) and mtDNA

SEQ ID NO: 72553 - DNA, 120 bp, Homo sapiens
  misc_feature: 701 for SV(C|O) and mtDNA
ggatgaggatggatagtaatagggcaaggacgcctcctagtttgttagggacggatcggagaattgtgtaggcgaataggaaatatcattcgggcttgatgtggggaggggtgtttaagg

SEQ ID NO: 72554 - DNA, 120 bp, Homo sapiens
  misc_feature: 701 for SV(C|O) and mtDNA
cgtacatagcacattacagtcaaatcccttctcgtccccatggatgacccccctcagataggggtcccttgaccaccatcctccgtgaaatcaatatcccgcacaagagtgctactctcc

SEQ ID NO: 72555 - DNA, 120 bp, Homo sapiens
  misc_feature: 701 for SV(C|O) and mtDNA
ggagaatgttttcatgttacttatactaacattagttcttctatagggtgatagattggtccaattgggtgtgaggagttcagttatatgtttgggattttttaggtagtgggtgttgag

SEQ ID NO: 72556 - DNA, 120 bp, Homo sapiens; identical to SEQ ID NO: 62053
  misc_feature: 701 for SV(C|O) and mtDNA

SEQ ID NO: 72557 - DNA, 120 bp, Homo sapiens
  misc_feature: 701 for SV(C|O) and mtDNA
gcgaagaaaaaaacttctgaggtaataaataggattatcccgtatcgaaggcctttttggacaggtggtgtgtggtggccttggtatgtgctttctcgtgttacatcgcgccatcattgg

SEQ ID NO: 72558 - DNA, 120 bp, Homo sapiens; identical to SEQ ID NO: 55895
  misc_feature: 701 for SV(C|O) and mtDNA

SEQ ID NO: 72559 - DNA, 120 bp, Homo sapiens
  misc_feature: 701 for SV(C|O) and mtDNA
atccattggtcttaggccccaaaaattttggtgcaactccaaataaaagtaacaaccatgcacactactataaccaccctaaccctgacttccctaattccccccatccttaccaccctc

SEQ ID NO: 72560 - DNA, 120 bp, Homo sapiens; identical to SEQ ID NO: 54351
  misc_feature: 701 for SV(C|O) and mtDNA

SEQ ID NO: 72561 - DNA, 120 bp, Homo sapiens; identical to SEQ ID NO: 57501
  misc_feature: 701 for SV(C|O) and mtDNA

SEQ ID NO: 72562 - DNA, 120 bp, Homo sapiens; identical to SEQ ID NO: 55896
  misc_feature: 701 for SV(C|O) and mtDNA

SEQ ID NO: 72563 - DNA, 120 bp, Homo sapiens; identical to SEQ ID NO: 56877
  misc_feature: 701 for SV(C|O) and mtDNA

SEQ ID NO: 72564 - DNA, 120 bp, Homo sapiens
  misc_feature: 701 for SV(C|O) and mtDNA
accactccagcctagcccctaccccccaattaggagggcactggcccccaacaggcatcaccccgctaaatcccctagaagtcccactcctaaacacatccgtattactcgcatcaggag

SEQ ID NO: 72565 - DNA, 120 bp, Homo sapiens
  misc_feature: 701 for SV(C|O) and mtDNA
aatagtcaaaccacgtctacaaaatgccagtatcaggcggcggcttcgaagccaaagtgatgtttggatgtaaagtgaaatattagttggcggatgaagcagatagtgaggaaagttgag

SEQ ID NO: 72566 - DNA, 120 bp, Homo sapiens
  misc_feature: 701 for SV(C|O) and mtDNA
cctagcccacttcttaccacaaggcacacctacaccccttatccccatactagttattatcgaaaccatcagcctactcattcaaccaatagccctggccgtacgcctaaccgctaacat

SEQ ID NO: 72567 - DNA, 120 bp, Homo sapiens
  misc_feature: 701 for SV(C|O) and mtDNA
cctaccccccaattaggagggcactggcccccaacaggcatcaccccgctaaatcccctagaagtcccactcctaaacacatccgtattactcgcatcaggagtatcaatcacctgagct

SEQ ID NO: 72568 - DNA, 120 bp, Homo sapiens
  misc_feature: 701 for SV(C|O) and mtDNA
cctaacaacccccctcctaatactaactacctgactcctacccctcacaatcatggcaagccaacgccacttatccagtgaaccactatcacgaaaaaaactctacctctctatactaat

SEQ ID NO: 72569 - DNA, 120 bp, Homo sapiens
  misc_feature: 701 for SV(C|O) and mtDNA
acagctaaataggttgttgttgatttggttaaaaaatagtagagggatgatgctaataattaggctgtgggtggttgtgttgattcaaattatgtgttttttggaaagtcatgtcagtgg

SEQ ID NO: 72570 - DNA, 120 bp, Homo sapiens; identical to SEQ ID NO: 56930
  misc_feature: 701 for SV(C|O) and mtDNA

SEQ ID NO: 72571 - DNA, 120 bp, Homo sapiens
  misc_feature: 701 for SV(C|O) and mtDNA
cagcggtgggcctagccctactagtctcaatctccaacacatatggcctagactacgtacataacctaaacctactccaatgctaaaactaatcgtcccaacaattatattactaccact

SEQ ID NO: 72572 - DNA, 120 bp, Homo sapiens
  misc_feature: 701 for SV(C|O) and mtDNA
actagactacttctccataatattcatccctgtagcattattcgttacatggtccatcatagaattctcactgtgatatataaactcagacccaaacattaatcagttcttcaaatatct

SEQ ID NO: 72573 - DNA, 120 bp, Homo sapiens
  misc_feature: 701 for SV(C|O) and mtDNA
acccactccaccttactaccagacaaccttagccaaaccatttacccaaataaagtataggcgatagaaattgaaacctggcgcaatagatatagtaccgcaagggaaagatgaaaaatt

SEQ ID NO: 72574 - DNA, 120 bp, Homo sapiens
  misc_feature: 700 for SV(C|O) and mtDNA
aaccctcattcacacgagaaaacaccctcatgttcatacacctatcccccattctcctcctatccctcaaccccgacatcattaccgggttttcctcttgtaaatatagtttaaccaaaa

SEQ ID NO: 72575 - DNA, 120 bp, Homo sapiens
  misc_feature: 700 for SV(C|O) and mtDNA
ttttaccactccagcctagcccctaccccccaattaggagggcactggcccccaacaggcatcaccccgctaaatcccctagaagtcccactcctaaacacatccgtattactcgcatca

SEQ ID NO: 72576 - DNA, 120 bp, Homo sapiens; identical to SEQ ID NO: 58764
  misc_feature: 700 for SV(C|O) and mtDNA

SEQ ID NO: 72577 - DNA, 120 bp, Homo sapiens; identical to SEQ ID NO: 52482
  misc_feature: 700 for SV(C|O) and mtDNA

SEQ ID NO: 72578 - DNA, 120 bp, Homo sapiens; identical to SEQ ID NO: 57068
  misc_feature: 700 for SV(C|O) and mtDNA

SEQ ID NO: 72579 - DNA, 120 bp, Homo sapiens; identical to SEQ ID NO: 53256
  misc_feature: 700 for SV(C|O) and mtDNA

SEQ ID NO: 72580 - DNA, 120 bp, Homo sapiens
  misc_feature: 700 for SV(C|O) and mtDNA
ttaaattagaatcttagctttgggtgctaatggtggagttaaagactttttctctgatttgtccttggaaaaaggttttcatctccggtttacaagactggtgtattagtttatactaca

SEQ ID NO: 72581 - DNA, 120 bp, Homo sapiens
  misc_feature: 700 for SV(C|O) and mtDNA
tggtggctgcttttaggcctactatgggtgttaaattttttactctctctacaaggttttttcctagtgtccaaagagctgttcctctttggactaacagttaaatttacaaggggattt

SEQ ID NO: 72582 - DNA, 120 bp, Homo sapiens; identical to SEQ ID NO: 56859
  misc_feature: 700 for SV(C|O) and mtDNA

SEQ ID NO: 72583 - DNA, 120 bp, Homo sapiens
  misc_feature: 700 for SV(C|O) and mtDNA
tgctaggatgaggatggatagtaatagggcaaggacgcctcctagtttgttagggacggatcggagaattgtgtaggcgaataggaaatatcattcgggcttgatgtggggaggggtgtt

SEQ ID NO: 72584 - DNA, 120 bp, Homo sapiens
  misc_feature: 700 for SV(C|O) and mtDNA
tgcaacttactgagggctttgaaggctcttggtctgtatttaacctaaatttctataagattattagtataaaaggggagataggtaggagtagcgtggtaagggcgatgagtgtgggga

SEQ ID NO: 72585 - DNA, 120 bp, Homo sapiens
  misc_feature: 700 for SV(C|O) and mtDNA
tgatgaaggctacaaagtaagcgcaagtacccacgtaaagacgttaggtcaaggtgtagcccatgaggtggcaagaaatgggctacattttctaccccagaaaactacgatagcccttat

SEQ ID NO: 72586 - DNA, 120 bp, Homo sapiens; identical to SEQ ID NO: 53181
  misc_feature: 700 for SV(C|O) and mtDNA

SEQ ID NO: 72587 - DNA, 120 bp, Homo sapiens
  misc_feature: 700 for SV(C|O) and mtDNA
aattggtggctgcttttaggcctactatgggtgttaaattttttactctctctacaaggttttttcctagtgtccaaagagctgttcctctttggactaacagttaaatttacaagggga

SEQ ID NO: 72588 - DNA, 120 bp, Homo sapiens
  misc_feature: 700 for SV(C|O) and mtDNA
tagtggggtatctaatcccagtttgggtcttagctattgtgtgttcagatatgttaaagccactttcgtagtctattttgtgtcagctggagttttttacaactcaggtgagttttagct

SEQ ID NO: 72589 - DNA, 120 bp, Homo sapiens
  misc_feature: 700 for SV(C|O) and mtDNA
tactaatcaacgcccataatcatacaaagcccccgcaccaataggatcctcccgaatcaaccctgacccctctccttcataaattattcagcttcctacactattaaagtttaccacaac

SEQ ID NO: 72590 - DNA, 120 bp, Homo sapiens
  misc_feature: 700 for SV(C|O) and mtDNA
attttaggtctgtttgtcgtaggcagatggagcttgttataattatgcctcatagggatagtacaaggaaggggtaggctatgtgttttgtcagggggttgagaatgagtgtgaggcgta

SEQ ID NO: 72591 - DNA, 120 bp, Homo sapiens
  misc_feature: 700 for SV(C|O) and mtDNA
agtcaaaatgtaataattattagtagtaaggctaggagggtgttgattattaaaattaaggcgaagtttattactcttttttgaatgttgtcaaaactagttaattggaagttaacggta

SEQ ID NO: 72592 - DNA, 120 bp, Homo sapiens
  misc_feature: 700 for SV(C|O) and mtDNA
tacaccccttatccccatactagttattatcgaaaccatcagcctactcattcaaccaatagccctggccgtacgcctaaccgctaacattactgcaggccacctactcatgcacctaat

SEQ ID NO: 72593 - DNA, 120 bp, Homo sapiens; identical to SEQ ID NO: 53090
  misc_feature: 700 for SV(C|O) and mtDNA

SEQ ID NO: 72594 - DNA, 120 bp, Homo sapiens
  misc_feature: 700 for SV(C|O) and mtDNA
taagtggagtccgtaaagaggtatctttactataaaagctattgtgtaagctagtcatattaagttgttggctcaggagtttgatagttcttgggcagtgagagtgagtagtagaatgtt

SEQ ID NO: 72595 - DNA, 120 bp, Homo sapiens; identical to SEQ ID NO: 54642
  misc_feature: 700 for SV(C|O) and mtDNA

SEQ ID NO: 72596 - DNA, 120 bp, Homo sapiens
  misc_feature: 700 for SV(C|O) and mtDNA
gttcgtctgtaatattgaacgtaggtgcgataaataataggatgaggcaggaatcaaagacagatactgcgacatagggtgctccggctccagcgtctcgcaatgctatcgcgtgcacac

SEQ ID NO: 72597 - DNA, 120 bp, Homo sapiens
  misc_feature: 700 for SV(C|O) and mtDNA
cagcccatgacccctaacaggggccctctcagccctcctaatgacctccggcctagccatgtgatttcacttccactccataacgctcctcatactaggcctactaaccaacacactaac

SEQ ID NO: 72598 - DNA, 120 bp, Homo sapiens
  misc_feature: 700 for SV(C|O) and mtDNA
gtaagcattaggaatgccattgcgattagaatgggtacaatgaggagtaggaggttggccatgggtatgttgttaagaagaggaattgaacctctgactgtaaagttttaagttttatgc

SEQ ID NO: 72599 - DNA, 120 bp, Homo sapiens
  misc_feature: 700 for SV(C|O) and mtDNA
gagagagtaaaaaatttaacacccatagtaggcctaaaagcagccaccaattaagaaagcgttcaagctcaacacccactacctaaaaaatcccaaacatataactgaactcctcacacc

SEQ ID NO: 72600 - DNA, 120 bp, Homo sapiens
  misc_feature: 700 for SV(C|O) and mtDNA
gggcatccatatagtcactccaggtttatggagggttcttctactattaggacttttcgcttcgaagcgaaggcttctcaaatcatgaaaattattaatattactgctgttagagaaatg

SEQ ID NO: 72601 - DNA, 120 bp, Homo sapiens; identical to SEQ ID NO: 57418
  misc_feature: 700 for SV(C|O) and mtDNA

SEQ ID NO: 72602 - DNA, 120 bp, Homo sapiens
  misc_feature: 700 for SV(C|O) and mtDNA
ctttggacactaggaaaaaaccttgtagagagagtaaaaaatttaacacccatagtaggcctaaaagcagccaccaattaagaaagcgttcaagctcaacacccactacctaaaaaatcc

SEQ ID NO: 72603 - DNA, 120 bp, Homo sapiens
  misc_feature: 700 for SV(C|O) and mtDNA
ggactacaaccacgaccaatgatatgaaaaaccatcgttgtatttcaactacaagaacaccaatgaccccaatacgcaaaattaaccccctaataaaattaattaaccactcattcatcg

SEQ ID NO: 72604 - DNA, 120 bp, Homo sapiens
  misc_feature: 700 for SV(C|O) and mtDNA
gctaaataggttgttgttgatttggttaaaaaatagtagagggatgatgctaataattaggctgtgggtggttgtgttgattcaaattatgtgttttttggaaagtcatgtcagtggtag

SEQ ID NO: 72605 - DNA, 120 bp, Homo sapiens
  misc_feature: 700 for SV(C|O) and mtDNA
cttttaccactccagcctagcccctaccccccaattaggagggcactggcccccaacaggcatcaccccgctaaatcccctagaagtcccactcctaaacacatccgtattactcgcatc

SEQ ID NO: 72606 - DNA, 120 bp, Homo sapiens; identical to SEQ ID NO: 61123
  misc_feature: 700 for SV(C|O) and mtDNA

SEQ ID NO: 72607 - DNA, 120 bp, Homo sapiens; identical to SEQ ID NO: 54628
  misc_feature: 700 for SV(C|O) and mtDNA

SEQ ID NO: 72608 - DNA, 120 bp, Homo sapiens
  misc_feature: 700 for SV(C|O) and mtDNA
cctaccacacattcgaagaacccgtatacataaaatctagacaaaaaaggaaggaatcgaaccccccaaagctggtttcaagccaaccccatggcctccatgactttttcaaaaaggtat

SEQ ID NO: 72609 - DNA, 120 bp, Homo sapiens
  misc_feature: 700 for SV(C|O) and mtDNA
ccgcactcgtaaggggtggatttttctatgtagccgttgagttgtggtagtcaaaatgtaataattattagtagtaaggctaggagggtgttgattattaaaattaaggcgaagtttatt

SEQ ID NO: 72610 - DNA, 120 bp, Homo sapiens
  misc_feature: 700 for SV(C|O) and mtDNA
ccgacggcatctacggctcaacattttttgtagccacaggcttccacggacttcacgtcattattggctcaactttcctcactatctgcttcatccgccaactaatatttcactttacat

SEQ ID NO: 72611 - DNA, 120 bp, Homo sapiens
  misc_feature: 700 for SV(C|O) and mtDNA
cccacccaagaacagggtttgttaagatggcagagcccggtaatcgcataaaacttaaaactttacagtcagaggttcaattcctcttcttaacaacatacccatggccaacctcctact

SEQ ID NO: 72612 - DNA, 120 bp, Homo sapiens
  misc_feature: 700 for SV(C|O) and mtDNA
aacagctaaataggttgttgttgatttggttaaaaaatagtagagggatgatgctaataattaggctgtgggtggttgtgttgattcaaattatgtgttttttggaaagtcatgtcagtg

SEQ ID NO: 72613 - DNA, 120 bp, Homo sapiens; identical to SEQ ID NO: 56243
  misc_feature: 700 for SV(C|O) and mtDNA

SEQ ID NO: 72614 - DNA, 120 bp, Homo sapiens; identical to SEQ ID NO: 56272
  misc_feature: 700 for SV(C|O) and mtDNA

SEQ ID NO: 72615 - DNA, 120 bp, Homo sapiens
  misc_feature: 700 for SV(C|O) and mtDNA
aattcctccctgtacgaaaggacaagagaaataaggcctacttcacaaagcgccttcccccgtaaatgatatcatctcaacttagtattatacccacacccacccaagaacagggtttgt

SEQ ID NO: 72616 - DNA, 120 bp, Homo sapiens
  misc_feature: 700 for SV(C|O) and mtDNA
aaactcacctgagttgtaaaaaactccagctgacacaaaatagactacgaaagtggctttaacatatctgaacacacaatagctaagacccaaactgggattagataccccactatgctt

SEQ ID NO: 72617 - DNA, 120 bp, Homo sapiens; identical to SEQ ID NO: 57130
  misc_feature: 699 for SV(C|O) and mtDNA

SEQ ID NO: 72618 - DNA, 120 bp, Homo sapiens
  misc_feature: 699 for SV(C|O) and mtDNA
tagcattgcgagacgctggagccggagcaccctatgtcgcagtatctgtctttgattcctgcctcatcctattatttatcgcacctacgttcaatattacagacgaacatacttactaaa

SEQ ID NO: 72619 - DNA, 120 bp, Homo sapiens; identical to SEQ ID NO: 57736
  misc_feature: 699 for SV(C|O) and mtDNA

SEQ ID NO: 72620 - DNA, 120 bp, Homo sapiens
  misc_feature: 699 for SV(C|O) and mtDNA
ttgaagtagatagaaaccgacctggattactccggtctgaactcagatcacgtaggactttaatcgttgaacaaacgaacctttaatagcggctgcaccatcgggatgtcctgatccaac

SEQ ID NO: 72621 - DNA, 120 bp, Homo sapiens
  misc_feature: 699 for SV(C|O) and mtDNA
atccccttatgagcgggcgcagtgattataggctttcgctctaagattaaaaatgccctagcccacttcttaccacaaggcacacctacaccccttatccccatactagttattatcgaa

SEQ ID NO: 72622 - DNA, 120 bp, Homo sapiens
  misc_feature: 699 for SV(C|O) and mtDNA
ctacaccccttatccccatactagttattatcgaaaccatcagcctactcattcaaccaatagccctggccgtacgcctaaccgctaacattactgcaggccacctactcatgcacctaa

SEQ ID NO: 72623 - DNA, 120 bp, Homo sapiens
  misc_feature: 699 for SV(C|O) and mtDNA
ggcccaccataattacccccatactccttacactattcctcatcacccaactaaaaatattaaacacaaactaccacctacctccctcaccaaagcccataaaaataaaaaattataaca

SEQ ID NO: 72624 - DNA, 120 bp, Homo sapiens
  misc_feature: 699 for SV(C|O) and mtDNA
tgacccctaacaggggccctctcagccctcctaatgacctccggcctagccatgtgatttcacttccactccataacgctcctcatactaggcctactaaccaacacactaaccatatac

SEQ ID NO: 72625 - DNA, 120 bp, Homo sapiens; identical to SEQ ID NO: 52626
  misc_feature: 699 for SV(C|O) and mtDNA

SEQ ID NO: 72626 - DNA, 120 bp, Homo sapiens; identical to SEQ ID NO: 55615
  misc_feature: 699 for SV(C|O) and mtDNA

SEQ ID NO: 72627 - DNA, 120 bp, Homo sapiens
  misc_feature: 699 for SV(C|O) and mtDNA
tcatgtggtgtatgcatcggggtagtccgagtaacgtcggggcattccggataggccgagaaagtgttgtgggaagaaagttagatttacgccgatgaatatgatagtgaaatggatttt

SEQ ID NO: 72628 - DNA, 120 bp, Homo sapiens; identical to SEQ ID NO: 55214
  misc_feature: 699 for SV(C|O) and mtDNA

SEQ ID NO: 72629 - DNA, 120 bp, Homo sapiens
  misc_feature: 699 for SV(C|O) and mtDNA
tatttatgggggtttagtattgattgttagcggtgtggtcgggtgtgttattattctgaattttgggggaggttatatgggtttaatagtttttttaatttatttagggggaatgatggt

SEQ ID NO: 72630 - DNA, 120 bp, Homo sapiens
  misc_feature: 699 for SV(C|O) and mtDNA
gtttaaattagaatcttagctttgggtgctaatggtggagttaaagactttttctctgatttgtccttggaaaaaggttttcatctccggtttacaagactggtgtattagtttatacta

SEQ ID NO: 72631 - DNA, 120 bp, Homo sapiens
  misc_feature: 699 for SV(C|O) and mtDNA
agggggaatgctggagattgtaatgggtatggagacatatcatataagtaatgctagggtgagtggtaggaagttttttcataggaggtgtatgagttggtcgtagcggaatcgggggta

SEQ ID NO: 72632 - DNA, 120 bp, Homo sapiens; identical to SEQ ID NO: 57971
  misc_feature: 699 for SV(C|O) and mtDNA

SEQ ID NO: 72633 - DNA, 120 bp, Homo sapiens
  misc_feature: 699 for SV(C|O) and mtDNA
attgcatactcttcaatcagccacatagccctcgtagtaacagccattctcatccaaaccccctgaagcttcaccggcgcagtcattctcataatcgcccacggacttacatcctcatta

SEQ ID NO: 72634 - DNA, 120 bp, Homo sapiens
  misc_feature: 699 for SV(C|O) and mtDNA
taaacctggagtgactatatggatgccccccaccctaccacacattcgaagaacccgtatacataaaatctagacaaaaaaggaaggaatcgaaccccccaaagctggtttcaagccaac

SEQ ID NO: 72635 - DNA, 120 bp, Homo sapiens; identical to SEQ ID NO: 56579
  misc_feature: 699 for SV(C|O) and mtDNA

SEQ ID NO: 72636 - DNA, 120 bp, Homo sapiens
  misc_feature: 699 for SV(C|O) and mtDNA
cgcagtactgatcattctatttccccctctattgatccccacctccaaatatctcatcaacaaccgactaatcaccacccaacaatgactaatcaaactaacctcaaaacaaatgataac

SEQ ID NO: 72637 - DNA, 120 bp, Homo sapiens; identical to SEQ ID NO: 54733
  misc_feature: 699 for SV(C|O) and mtDNA

SEQ ID NO: 72638 - DNA, 120 bp, Homo sapiens
  misc_feature: 699 for SV(C|O) and mtDNA
gtcatgcccgcctcttcacgggcaggtcaatttcactggttaaaagtaagagacagctgaaccctcgtggagccattcatacaggtccctatttaaggaacaagtgattatgctaccttt

SEQ ID NO: 72639 - DNA, 120 bp, Homo sapiens; identical to SEQ ID NO: 55675
  misc_feature: 699 for SV(C|O) and mtDNA

SEQ ID NO: 72640 - DNA, 120 bp, Homo sapiens
  misc_feature: 699 for SV(C|O) and mtDNA
gcaagtactattgacccagcgatgggggcttcgacatgggctttagggagtcataagtggagtccgtaaagaggtatctttactataaaagctattgtgtaagctagtcatattaagttg

SEQ ID NO: 72641 - DNA, 120 bp, Homo sapiens
  misc_feature: 699 for SV(C|O) and mtDNA
gattttaggtctgtttgtcgtaggcagatggagcttgttataattatgcctcatagggatagtacaaggaaggggtaggctatgtgttttgtcagggggttgagaatgagtgtgaggcgt

SEQ ID NO: 72642 - DNA, 120 bp, Homo sapiens
  misc_feature: 699 for SV(C|O) and mtDNA
cgtccctaacaaactaggaggcgtccttgccctattactatccatcctcatcctagcaataatccccatcctccatatatccaaacaacaaagcataatatttcgcccactaagccaatc

SEQ ID NO: 72643 - DNA, 120 bp, Homo sapiens
  misc_feature: 699 for SV(C|O) and mtDNA
aaaagtcctaatagtagaagaaccctccataaacctggagtgactatatggatgccccccaccctaccacacattcgaagaacccgtatacataaaatctagacaaaaaaggaaggaatc

SEQ ID NO: 72644 - DNA, 120 bp, Homo sapiens; identical to SEQ ID NO: 61584
  misc_feature: 699 for SV(C|O) and mtDNA

SEQ ID NO: 72645 - DNA, 120 bp, Homo sapiens
  misc_feature: 699 for SV(C|O) and mtDNA
ctttcacccacagcaccaatcctacctccatcgctaaccccactaaaacactcaccaagacctcaacccctgacccccatgcctcaggatactcctcaatagccatcgctgtagtatatc

SEQ ID NO: 72646 - DNA, 120 bp, Homo sapiens
  misc_feature: 699 for SV(C|O) and mtDNA
gagtcataagtggagtccgtaaagaggtatctttactataaaagctattgtgtaagctagtcatattaagttgttggctcaggagtttgatagttcttgggcagtgagagtgagtagtag

SEQ ID NO: 72647 - DNA, 120 bp, Homo sapiens
  misc_feature: 699 for SV(C|O) and mtDNA
agcattgcgagacgctggagccggagcaccctatgtcgcagtatctgtctttgattcctgcctcatcctattatttatcgcacctacgttcaatattacagacgaacatacttactaaag

SEQ ID NO: 72648 - DNA, 120 bp, Homo sapiens
  misc_feature: 699 for SV(C|O) and mtDNA
aggatgaggatggatagtaatagggcaaggacgcctcctagtttgttagggacggatcggagaattgtgtaggcgaataggaaatatcattcgggcttgatgtggggaggggtgtttaag

SEQ ID NO: 72649 - DNA, 120 bp, Homo sapiens
  misc_feature: 699 for SV(C|O) and mtDNA
ctatgtgttttgtcagggggttgagaatgagtgtgaggcgtattataccatagccgcctagttttaagagtactgcggcaagtactattgacccagcgatgggggcttcgacatgggctt

SEQ ID NO: 72650 - DNA, 120 bp, Homo sapiens
  misc_feature: 699 for SV(C|O) and mtDNA
cctacaacgttggggcctttgcgtagttgtatatagcctagaatttttcgttcggtaagcattaggaatgccattgcgattagaatgggtacaatgaggagtaggaggttggccatgggt

SEQ ID NO: 72651 - DNA, 120 bp, Homo sapiens
  misc_feature: 699 for SV(C|O) and mtDNA
cattgcatactcttcaatcagccacatagccctcgtagtaacagccattctcatccaaaccccctgaagcttcaccggcgcagtcattctcataatcgcccacggacttacatcctcatt

SEQ ID NO: 72652 - DNA, 120 bp, Homo sapiens
  misc_feature: 699 for SV(C|O) and mtDNA
cataattacccccatactccttacactattcctcatcacccaactaaaaatattaaacacaaactaccacctacctccctcaccaaagcccataaaaataaaaaattataacaaaccctg

SEQ ID NO: 72653 - DNA, 120 bp, Homo sapiens
  misc_feature: 699 for SV(C|O) and mtDNA
agtactattgacccagcgatgggggcttcgacatgggctttagggagtcataagtggagtccgtaaagaggtatctttactataaaagctattgtgtaagctagtcatattaagttgttg

SEQ ID NO: 72654 - DNA, 120 bp, Homo sapiens; identical to SEQ ID NO: 54208
  misc_feature: 699 for SV(C|O) and mtDNA

SEQ ID NO: 72655 - DNA, 120 bp, Homo sapiens; identical to SEQ ID NO: 53495
  misc_feature: 699 for SV(C|O) and mtDNA

SEQ ID NO: 72656 - DNA, 120 bp, Homo sapiens; identical to SEQ ID NO: 58278
  misc_feature: 699 for SV(C|O) and mtDNA

SEQ ID NO: 72657 - DNA, 120 bp, Homo sapiens
  misc_feature: 699 for SV(C|O) and mtDNA
ataagtggagtccgtaaagaggtatctttactataaaagctattgtgtaagctagtcatattaagttgttggctcaggagtttgatagttcttgggcagtgagagtgagtagtagaatgt

SEQ ID NO: 72658 - DNA, 120 bp, Homo sapiens
  misc_feature: 699 for SV(C|O) and mtDNA
aacaacataaaaccctcattcacacgagaaaacaccctcatgttcatacacctatcccccattctcctcctatccctcaaccccgacatcattaccgggttttcctcttgtaaatatagt

SEQ ID NO: 72659 - DNA, 120 bp, Homo sapiens; identical to SEQ ID NO: 52387
  misc_feature: 698 for SV(C|O) and mtDNA

SEQ ID NO: 72660 - DNA, 120 bp, Homo sapiens
  misc_feature: 698 for SV(C|O) and mtDNA
caaaaaggcataattaaactttacttcctctctttcttcttcccactcatcctaaccctactcctaatcacataacctattcccccgagcaatctcaattacaatatatacaccaacaaa

SEQ ID NO: 72661 - DNA, 120 bp, Homo sapiens
  misc_feature: 698 for SV(C|O) and mtDNA
gccccaaaaattttggtgcaactccaaataaaagtaacaaccatgcacactactataaccaccctaaccctgacttccctaattccccccatccttaccaccctcgttaaccctaacaaa

SEQ ID NO: 72662 - DNA, 120 bp, Homo sapiens
  misc_feature: 698 for SV(C|O) and mtDNA
aaaccctcattcacacgagaaaacaccctcatgttcatacacctatcccccattctcctcctatccctcaaccccgacatcattaccgggttttcctcttgtaaatatagtttaaccaaa

SEQ ID NO: 72663 - DNA, 120 bp, Homo sapiens; identical to SEQ ID NO: 61539
  misc_feature: 698 for SV(C|O) and mtDNA

SEQ ID NO: 72664 - DNA, 120 bp, Homo sapiens; identical to SEQ ID NO: 57256
  misc_feature: 698 for SV(C|O) and mtDNA

SEQ ID NO: 72665 - DNA, 120 bp, Homo sapiens
  misc_feature: 698 for SV(C|O) and mtDNA
acacattcgaagaacccgtatacataaaatctagacaaaaaaggaaggaatcgaaccccccaaagctggtttcaagccaaccccatggcctccatgactttttcaaaaaggtattagaaa

SEQ ID NO: 72666 - DNA, 120 bp, Homo sapiens
  misc_feature: 698 for SV(C|O) and mtDNA
cccctaacaggggccctctcagccctcctaatgacctccggcctagccatgtgatttcacttccactccataacgctcctcatactaggcctactaaccaacacactaaccatataccaa

SEQ ID NO: 72667 - DNA, 120 bp, Homo sapiens; identical to SEQ ID NO: 56596
  misc_feature: 698 for SV(C|O) and mtDNA

SEQ ID NO: 72668 - DNA, 120 bp, Homo sapiens
  misc_feature: 698 for SV(C|O) and mtDNA
ttctaccctaccatcacacaccgcacaatcccctatctaggccttcttacgagccaaaacctgcccctactcctcctagacctaacctgactagaaaagctattacctaaaacaatttca

SEQ ID NO: 72669 - DNA, 120 bp, Homo sapiens
  misc_feature: 698 for SV(C|O) and mtDNA
ttagcgggggcaggcctcctagggagaggagggtggatggaattaagggtgttagtcatgttagcttgtttcaggtgcgagatagtagtagggtcgtggtgctggagtttaagttgagta

SEQ ID NO: 72670 - DNA, 120 bp, Homo sapiens
  misc_feature: 698 for SV(C|O) and mtDNA
ttagatttacagtccaatgcttcactcagccattttacctcacccccactgatgttcgccgaccgttgactattctctacaaaccacaaagacattggaacactatacctattattcggc

SEQ ID NO: 72671 - DNA, 120 bp, Homo sapiens; identical to SEQ ID NO: 61504
  misc_feature: 698 for SV(C|O) and mtDNA

SEQ ID NO: 72672 - DNA, 120 bp, Homo sapiens; identical to SEQ ID NO: 57478
  misc_feature: 698 for SV(C|O) and mtDNA

SEQ ID NO: 72673 - DNA, 120 bp, Homo sapiens
  misc_feature: 698 for SV(C|O) and mtDNA
tggtatcctagtgggtgaggggtggctttggagttgcagttgatgtgtgatagttgagggttgattgctgtacttgcttgtaagcatggggagggggttttgatgtggattgggttttta

SEQ ID NO: 72674 - DNA, 120 bp, Homo sapiens
  misc_feature: 698 for SV(C|O) and mtDNA
tgggggctagtttttgtcatgtgagaagaagcaggccggatgtcagaggggtgccttgggtaacctctgggacccagaagtgaaagggggctattcctagttttattgctatagccatta

SEQ ID NO: 72675 - DNA, 120 bp, Homo sapiens
  misc_feature: 698 for SV(C|O) and mtDNA
cataaacctggagtgactatatggatgccccccaccctaccacacattcgaagaacccgtatacataaaatctagacaaaaaaggaaggaatcgaaccccccaaagctggtttcaagcca

SEQ ID NO: 72676 - DNA, 120 bp, Homo sapiens
  misc_feature: 698 for SV(C|O) and mtDNA
tggctgcttttaggcctactatgggtgttaaattttttactctctctacaaggttttttcctagtgtccaaagagctgttcctctttggactaacagttaaatttacaaggggatttaga

SEQ ID NO: 72677 - DNA, 120 bp, Homo sapiens; identical to SEQ ID NO: 56193
  misc_feature: 698 for SV(C|O) and mtDNA

SEQ ID NO: 72678 - DNA, 120 bp, Homo sapiens
  misc_feature: 698 for SV(C|O) and mtDNA
cactccaccttactaccagacaaccttagccaaaccatttacccaaataaagtataggcgatagaaattgaaacctggcgcaatagatatagtaccgcaagggaaagatgaaaaattata

SEQ ID NO: 72679 - DNA, 120 bp, Homo sapiens
  misc_feature: 698 for SV(C|O) and mtDNA
ctcgttccacagaagctgccatcaagtatttcctcacgcaagcaaccgcatccataatccttctaatagctatcctcttcaacaatatactctccggacaatgaaccataaccaatacta

SEQ ID NO: 72680 - DNA, 120 bp, Homo sapiens; identical to SEQ ID NO: 61171
  misc_feature: 698 for SV(C|O) and mtDNA

SEQ ID NO: 72681 - DNA, 120 bp, Homo sapiens
  misc_feature: 698 for SV(C|O) and mtDNA
attggtcttaggccccaaaaattttggtgcaactccaaataaaagtaacaaccatgcacactactataaccaccctaaccctgacttccctaattccccccatccttaccaccctcgtta

SEQ ID NO: 72682 - DNA, 120 bp, Homo sapiens
  misc_feature: 698 for SV(C|O) and mtDNA
ggtggctgcttttaggcctactatgggtgttaaattttttactctctctacaaggttttttcctagtgtccaaagagctgttcctctttggactaacagttaaatttacaaggggattta

SEQ ID NO: 72683 - DNA, 120 bp, Homo sapiens
  misc_feature: 698 for SV(C|O) and mtDNA
gcatagtggggtatctaatcccagtttgggtcttagctattgtgtgttcagatatgttaaagccactttcgtagtctattttgtgtcagctggagttttttacaactcaggtgagtttta

SEQ ID NO: 72684 - DNA, 120 bp, Homo sapiens; identical to SEQ ID NO: 61437
  misc_feature: 698 for SV(C|O) and mtDNA

SEQ ID NO: 72685 - DNA, 120 bp, Homo sapiens; identical to SEQ ID NO: 57841
  misc_feature: 698 for SV(C|O) and mtDNA

SEQ ID NO: 72686 - DNA, 120 bp, Homo sapiens; identical to SEQ ID NO: 52085
  misc_feature: 698 for SV(C|O) and mtDNA

SEQ ID NO: 72687 - DNA, 120 bp, Homo sapiens
  misc_feature: 698 for SV(C|O) and mtDNA
gtgggcctagccctactagtctcaatctccaacacatatggcctagactacgtacataacctaaacctactccaatgctaaaactaatcgtcccaacaattatattactaccactgacat

SEQ ID NO: 72688 - DNA, 120 bp, Homo sapiens; identical to SEQ ID NO: 56442
  misc_feature: 698 for SV(C|O) and mtDNA

SEQ ID NO: 72689 - DNA, 120 bp, Homo sapiens
  misc_feature: 698 for SV(C|O) and mtDNA
ccctatgtcgcagtatctgtctttgattcctgcctcatcctattatttatcgcacctacgttcaatattacagacgaacatacttactaaagtgtgttaattaattaatgcttgtaggac

SEQ ID NO: 72690 - DNA, 120 bp, Homo sapiens
  misc_feature: 698 for SV(C|O) and mtDNA
ccaacatactcggattctaccctaccatcacacaccgcacaatcccctatctaggccttcttacgagccaaaacctgcccctactcctcctagacctaacctgactagaaaagctattac

SEQ ID NO: 72691 - DNA, 120 bp, Homo sapiens
  misc_feature: 698 for SV(C|O) and mtDNA
gtaagtccgtgggcgattatgagaatgactgcgccggtgaagcttcagggggtttggatgagaatggctgttactacgagggctatgtggctgattgaagagtatgcaatgagcgatttt

SEQ ID NO: 72692 - DNA, 120 bp, Homo sapiens
  misc_feature: 698 for SV(C|O) and mtDNA
ggtcttaggccccaaaaattttggtgcaactccaaataaaagtaacaaccatgcacactactataaccaccctaaccctgacttccctaattccccccatccttaccaccctcgttaacc

SEQ ID NO: 72693 - DNA, 120 bp, Homo sapiens
  misc_feature: 698 for SV(C|O) and mtDNA
ggtatcctagtgggtgaggggtggctttggagttgcagttgatgtgtgatagttgagggttgattgctgtacttgcttgtaagcatggggagggggttttgatgtggattgggtttttat

SEQ ID NO: 72694 - DNA, 120 bp, Homo sapiens; identical to SEQ ID NO: 60600
  misc_feature: 698 for SV(C|O) and mtDNA

SEQ ID NO: 72695 - DNA, 120 bp, Homo sapiens
  misc_feature: 698 for SV(C|O) and mtDNA
gggctcactcacccaccacattaacaacataaaaccctcattcacacgagaaaacaccctcatgttcatacacctatcccccattctcctcctatccctcaaccccgacatcattaccgg

SEQ ID NO: 72696 - DNA, 120 bp, Homo sapiens; identical to SEQ ID NO: 57241
  misc_feature: 698 for SV(C|O) and mtDNA

SEQ ID NO: 72697 - DNA, 120 bp, Homo sapiens
  misc_feature: 698 for SV(C|O) and mtDNA
cgatagcttatttagctgaccttactttaggatggggtgtgataggtggcacggagaattttggattctcagggatgggttcgattctcatagtcctagaaataagggggtttaagctcc

SEQ ID NO: 72698 - DNA, 120 bp, Homo sapiens; identical to SEQ ID NO: 57520
  misc_feature: 698 for SV(C|O) and mtDNA

SEQ ID NO: 72699 - DNA, 120 bp, Homo sapiens
  misc_feature: 698 for SV(C|O) and mtDNA
gcggtgtgtacgcgcttcagggccctgttcaactaagcactctactctcagtttactgctaaatccaccttcgacccttaagtttcataagggctatcgtagttttctggggtagaaaat

SEQ ID NO: 72700 - DNA, 120 bp, Homo sapiens; identical to SEQ ID NO: 53652
  misc_feature: 698 for SV(C|O) and mtDNA

SEQ ID NO: 72701 - DNA, 120 bp, Homo sapiens
  misc_feature: 698 for SV(C|O) and mtDNA
atagccattatgattattaatgatgagtattgattggtagtattggttatggttcattgtccggagagtatattgttgaagaggatagctattagaaggattatggatgcggttgcttgc

SEQ ID NO: 72702 - DNA, 120 bp, Homo sapiens; identical to SEQ ID NO: 53163
  misc_feature: 698 for SV(C|O) and mtDNA

SEQ ID NO: 72703 - DNA, 120 bp, Homo sapiens
  misc_feature: 698 for SV(C|O) and mtDNA
ctcaatcacactactccccatatctaacaacgtaaaaataaaatgacagtttgaacatacaaaacccaccccattcctccccacactcatcgcccttaccacgctactcctacctatctc

SEQ ID NO: 72704 - DNA, 120 bp, Homo sapiens
  misc_feature: 698 for SV(C|O) and mtDNA
cttcttagtagctattaccttcttattatttgatctagaaattgccctccttttacccctaccatgagccctacaaacaactaacctaccactaatagttatgtcatccctcttattaat

SEQ ID NO: 72705 - DNA, 120 bp, Homo sapiens
  misc_feature: 698 for SV(C|O) and mtDNA
actgtaatgtgctatgtacggtaaatggctttatgtactatgtgctgttaagggtgagtaggtttgttggtatcctagtgggtgaggggtggctttggagttgcagttgatgtgtgatag

SEQ ID NO: 72706 - DNA, 120 bp, Homo sapiens; identical to SEQ ID NO: 54914
  misc_feature: 698 for SV(C|O) and mtDNA

SEQ ID NO: 72707 - DNA, 120 bp, Homo sapiens
  misc_feature: 698 for SV(C|O) and mtDNA
cctcaatcacactactccccatatctaacaacgtaaaaataaaatgacagtttgaacatacaaaacccaccccattcctccccacactcatcgcccttaccacgctactcctacctatct

SEQ ID NO: 72708 - DNA, 120 bp, Homo sapiens
  misc_feature: 698 for SV(C|O) and mtDNA
aagaagatataaaatatgattagttctgtggctgtgaatgttataattaaggagatttgtagggagattagtatagagaggtagagtttttttcgtgatagtggttcactggataagtgg

SEQ ID NO: 72709 - DNA, 120 bp, Homo sapiens; identical to SEQ ID NO: 57732
  misc_feature: 698 for SV(C|O) and mtDNA

SEQ ID NO: 72710 - DNA, 120 bp, Homo sapiens
  misc_feature: 698 for SV(C|O) and mtDNA
caagtactattgacccagcgatgggggcttcgacatgggctttagggagtcataagtggagtccgtaaagaggtatctttactataaaagctattgtgtaagctagtcatattaagttgt

SEQ ID NO: 72711 - DNA, 120 bp, Homo sapiens
  misc_feature: 698 for SV(C|O) and mtDNA
atcaataggagctgtatttgccatcataggaggcttcattcactgatttcccctattctcaggctacaccctagaccaaacctacgccaaaatccatttcactatcatattcatcggcgt

SEQ ID NO: 72712 - DNA, 120 bp, Homo sapiens
  misc_feature: 698 for SV(C|O) and mtDNA
atagcacattacagtcaaatcccttctcgtccccatggatgacccccctcagataggggtcccttgaccaccatcctccgtgaaatcaatatcccgcacaagagtgctactctcctcgct

SEQ ID NO: 72713 - DNA, 120 bp, Homo sapiens
  misc_feature: 698 for SV(C|O) and mtDNA
actattgacccagcgatgggggcttcgacatgggctttagggagtcataagtggagtccgtaaagaggtatctttactataaaagctattgtgtaagctagtcatattaagttgttggct

SEQ ID NO: 72714 - DNA, 120 bp, Homo sapiens
  misc_feature: 697 for SV(C|O) and mtDNA
gaaggctacaaagtaagcgcaagtacccacgtaaagacgttaggtcaaggtgtagcccatgaggtggcaagaaatgggctacattttctaccccagaaaactacgatagcccttatgaaa

SEQ ID NO: 72715 - DNA, 120 bp, Homo sapiens; identical to SEQ ID NO: 53914
  misc_feature: 697 for SV(C|O) and mtDNA

SEQ ID NO: 72716 - DNA, 120 bp, Homo sapiens; identical to SEQ ID NO: 61102
  misc_feature: 697 for SV(C|O) and mtDNA

SEQ ID NO: 72717 - DNA, 120 bp, Homo sapiens
  misc_feature: 697 for SV(C|O) and mtDNA
atagcattgcgagacgctggagccggagcaccctatgtcgcagtatctgtctttgattcctgcctcatcctattatttatcgcacctacgttcaatattacagacgaacatacttactaa

SEQ ID NO: 72718 - DNA, 120 bp, Homo sapiens; identical to SEQ ID NO: 56009
  misc_feature: 697 for SV(C|O) and mtDNA

SEQ ID NO: 72719 - DNA, 120 bp, Homo sapiens; identical to SEQ ID NO: 52054
  misc_feature: 697 for SV(C|O) and mtDNA

SEQ ID NO: 72720 - DNA, 120 bp, Homo sapiens; identical to SEQ ID NO: 53427
  misc_feature: 697 for SV(C|O) and mtDNA

SEQ ID NO: 72721 - DNA, 120 bp, Homo sapiens
  misc_feature: 697 for SV(C|O) and mtDNA
tgcggaggagaatgttttcatgttacttatactaacattagttcttctatagggtgatagattggtccaattgggtgtgaggagttcagttatatgtttgggattttttaggtagtgggt

SEQ ID NO: 72722 - DNA, 120 bp, Homo sapiens
  misc_feature: 697 for SV(C|O) and mtDNA
tgagggggaatgctggagattgtaatgggtatggagacatatcatataagtaatgctagggtgagtggtaggaagttttttcataggaggtgtatgagttggtcgtagcggaatcggggg

SEQ ID NO: 72723 - DNA, 120 bp, Homo sapiens; identical to SEQ ID NO: 51889
  misc_feature: 697 for SV(C|O) and mtDNA

SEQ ID NO: 72724 - DNA, 120 bp, Homo sapiens
  misc_feature: 697 for SV(C|O) and mtDNA
tcttaggccccaaaaattttggtgcaactccaaataaaagtaacaaccatgcacactactataaccaccctaaccctgacttccctaattccccccatccttaccaccctcgttaaccct

SEQ ID NO: 72725 - DNA, 120 bp, Homo sapiens; identical to SEQ ID NO: 55702
  misc_feature: 697 for SV(C|O) and mtDNA

SEQ ID NO: 72726 - DNA, 120 bp, Homo sapiens
  misc_feature: 697 for SV(C|O) and mtDNA
tcgcgtgcacaccccccagacgaaaataccaaatgcatggagagctcccgtgagtggttaatagggtgatagacctgtgatccatcgtgatgtcttatttaaggggaacgtgtgggctat

SEQ ID NO: 72727 - DNA, 120 bp, Homo sapiens
  misc_feature: 697 for SV(C|O) and mtDNA
tcaggacatcccgatggtgcagccgctattaaaggttcgtttgttcaacgattaaagtcctacgtgatctgagttcagaccggagtaatccaggtcggtttctatctacttcaaattcct

SEQ ID NO: 72728 - DNA, 120 bp, Homo sapiens; identical to SEQ ID NO: 56437
  misc_feature: 697 for SV(C|O) and mtDNA

SEQ ID NO: 72729 - DNA, 120 bp, Homo sapiens
  misc_feature: 697 for SV(C|O) and mtDNA
tatcctagtgggtgaggggtggctttggagttgcagttgatgtgtgatagttgagggttgattgctgtacttgcttgtaagcatggggagggggttttgatgtggattgggtttttatgt

SEQ ID NO: 72730 - DNA, 120 bp, Homo sapiens
  misc_feature: 697 for SV(C|O) and mtDNA
tagcgggggcaggcctcctagggagaggagggtggatggaattaagggtgttagtcatgttagcttgtttcaggtgcgagatagtagtagggtcgtggtgctggagtttaagttgagtag

SEQ ID NO: 72731 - DNA, 120 bp, Homo sapiens
  misc_feature: 697 for SV(C|O) and mtDNA
tacaacgttggggcctttgcgtagttgtatatagcctagaatttttcgttcggtaagcattaggaatgccattgcgattagaatgggtacaatgaggagtaggaggttggccatgggtat

SEQ ID NO: 72732 - DNA, 120 bp, Homo sapiens
  misc_feature: 697 for SV(C|O) and mtDNA
tacaaaccacaaagacattggaacactatacctattattcggcgcatgagctggagtcctaggcacagctctaagcctccttattcgagccgagctgggccagccaggcaaccttctagg

SEQ ID NO: 72733 - DNA, 120 bp, Homo sapiens
  misc_feature: 697 for SV(C|O) and mtDNA
ccccatactagttattatcgaaaccatcagcctactcattcaaccaatagccctggccgtacgcctaaccgctaacattactgcaggccacctactcatgcacctaattggaagcgccac

SEQ ID NO: 72734 - DNA, 120 bp, Homo sapiens
  misc_feature: 697 for SV(C|O) and mtDNA
gtcaaaatgtaataattattagtagtaaggctaggagggtgttgattattaaaattaaggcgaagtttattactcttttttgaatgttgtcaaaactagttaattggaagttaacggtac

SEQ ID NO: 72735 - DNA, 120 bp, Homo sapiens; identical to SEQ ID NO: 53732
  misc_feature: 697 for SV(C|O) and mtDNA

SEQ ID NO: 72736 - DNA, 120 bp, Homo sapiens
  misc_feature: 697 for SV(C|O) and mtDNA
gggggctagtttttgtcatgtgagaagaagcaggccggatgtcagaggggtgccttgggtaacctctgggacccagaagtgaaagggggctattcctagttttattgctatagccattat

SEQ ID NO: 72737 - DNA, 120 bp, Homo sapiens
  misc_feature: 697 for SV(C|O) and mtDNA
agaactatcaaactcctgagccaacaacttaatatgactagcttacacaatagcttttatagtaaagatacctctttacggactccacttatgactccctaaagcccatgtcgaagcccc

SEQ ID NO: 72738 - DNA, 120 bp, Homo sapiens
  misc_feature: 697 for SV(C|O) and mtDNA
gcctcatcgggtgatgatagccaaggtggggataagtgtggtttcgaagaagatataaaatatgattagttctgtggctgtgaatgttataattaaggagatttgtagggagattagtat

SEQ ID NO: 72739 - DNA, 120 bp, Homo sapiens; identical to SEQ ID NO: 58183
  misc_feature: 697 for SV(C|O) and mtDNA

SEQ ID NO: 72740 - DNA, 120 bp, Homo sapiens; identical to SEQ ID NO: 53420
  misc_feature: 697 for SV(C|O) and mtDNA

SEQ ID NO: 72741 - DNA, 120 bp, Homo sapiens
  misc_feature: 697 for SV(C|O) and mtDNA
ctatcaaactcctgagccaacaacttaatatgactagcttacacaatagcttttatagtaaagatacctctttacggactccacttatgactccctaaagcccatgtcgaagcccccatc

SEQ ID NO: 72742 - DNA, 120 bp, Homo sapiens
  misc_feature: 697 for SV(C|O) and mtDNA
caggacatcccgatggtgcagccgctattaaaggttcgtttgttcaacgattaaagtcctacgtgatctgagttcagaccggagtaatccaggtcggtttctatctacttcaaattcctc

SEQ ID NO: 72743 - DNA, 120 bp, Homo sapiens; identical to SEQ ID NO: 55712
  misc_feature: 697 for SV(C|O) and mtDNA

SEQ ID NO: 72744 - DNA, 120 bp, Homo sapiens; identical to SEQ ID NO: 53403
  misc_feature: 697 for SV(C|O) and mtDNA

SEQ ID NO: 72745 - DNA, 120 bp, Homo sapiens
  misc_feature: 697 for SV(C|O) and mtDNA
aaaaactccagctgacacaaaatagactacgaaagtggctttaacatatctgaacacacaatagctaagacccaaactgggattagataccccactatgcttagccctaaacctcaacag

SEQ ID NO: 72746 - DNA, 120 bp, Homo sapiens
  misc_feature: 697 for SV(C|O) and mtDNA
atggagctttaatttattaatgcaaacagtacctaacaaacccacaggtcctaaactaccaaacctgcattaaaaatttcggttggggcgacctcggagcagaacccaacctccgagcag

SEQ ID NO: 72747 - DNA, 120 bp, Homo sapiens
  misc_feature: 697 for SV(C|O) and mtDNA
ctccggtctgaactcagatcacgtaggactttaatcgttgaacaaacgaacctttaatagcggctgcaccatcgggatgtcctgatccaacatcgaggtcgtaaaccctattgttgatat

SEQ ID NO: 72748 - DNA, 120 bp, Homo sapiens; identical to SEQ ID NO: 57505
  misc_feature: 697 for SV(C|O) and mtDNA

SEQ ID NO: 72749 - DNA, 120 bp, Homo sapiens
  misc_feature: 697 for SV(C|O) and mtDNA
actgattaatgtttgggtctgagtttatatatcacagtgagaattctatgatggaccatgtaacgaataatgctacagggatgaatattatggagaagtagtctagtttgaagcttaggg

SEQ ID NO: 72750 - DNA, 120 bp, Homo sapiens
  misc_feature: 697 for SV(C|O) and mtDNA
ccctaacaaactaggaggcgtccttgccctattactatccatcctcatcctagcaataatccccatcctccatatatccaaacaacaaagcataatatttcgcccactaagccaatcact

SEQ ID NO: 72751 - DNA, 120 bp, Homo sapiens
  misc_feature: 697 for SV(C|O) and mtDNA
ccactccaccttactaccagacaaccttagccaaaccatttacccaaataaagtataggcgatagaaattgaaacctggcgcaatagatatagtaccgcaagggaaagatgaaaaattat

SEQ ID NO: 72752 - DNA, 120 bp, Homo sapiens; identical to SEQ ID NO: 53735
  misc_feature: 697 for SV(C|O) and mtDNA

SEQ ID NO: 72753 - DNA, 120 bp, Homo sapiens
  misc_feature: 697 for SV(C|O) and mtDNA
catgtaacgaataatgctacagggatgaatattatggagaagtagtctagtttgaagcttagggagagctgggttgtttgggttgtggctcagtgtcagttcgagataataacttcttgg

SEQ ID NO: 72754 - DNA, 120 bp, Homo sapiens; identical to SEQ ID NO: 55921
  misc_feature: 697 for SV(C|O) and mtDNA

SEQ ID NO: 72755 - DNA, 120 bp, Homo sapiens
  misc_feature: 697 for SV(C|O) and mtDNA
aagcttatgttgtttatgcggggaaacgccatatcgggggcaccgattattaggggaactagtcagttgccaaagcctccgattatgatgggtattactatgaagaagattattacaaat

SEQ ID NO: 72756 - DNA, 120 bp, Homo sapiens; identical to SEQ ID NO: 53387
  misc_feature: 697 for SV(C|O) and mtDNA

SEQ ID NO: 72757 - DNA, 120 bp, Homo sapiens
  misc_feature: 697 for SV(C|O) and mtDNA
agtttaaattagaatcttagctttgggtgctaatggtggagttaaagactttttctctgatttgtccttggaaaaaggttttcatctccggtttacaagactggtgtattagtttatact

SEQ ID NO: 72758 - DNA, 120 bp, Homo sapiens
  misc_feature: 697 for SV(C|O) and mtDNA
aaaactcacctgagttgtaaaaaactccagctgacacaaaatagactacgaaagtggctttaacatatctgaacacacaatagctaagacccaaactgggattagataccccactatgct

SEQ ID NO: 72759 - DNA, 120 bp, Homo sapiens
  misc_feature: 696 for SV(C|O) and mtDNA
tccccttatgagcgggcgcagtgattataggctttcgctctaagattaaaaatgccctagcccacttcttaccacaaggcacacctacaccccttatccccatactagttattatcgaaa

SEQ ID NO: 72760 - DNA, 120 bp, Homo sapiens
  misc_feature: 696 for SV(C|O) and mtDNA
ctccagctgacacaaaatagactacgaaagtggctttaacatatctgaacacacaatagctaagacccaaactgggattagataccccactatgcttagccctaaacctcaacagttaaa

SEQ ID NO: 72761 - DNA, 120 bp, Homo sapiens
  misc_feature: 696 for SV(C|O) and mtDNA
cagtactcttaaaactaggcggctatggtataatacgcctcacactcattctcaaccccctgacaaaacacatagcctaccccttccttgtactatccctatgaggcataattataacaa

SEQ ID NO: 72762 - DNA, 120 bp, Homo sapiens; identical to SEQ ID NO: 56186
  misc_feature: 696 for SV(C|O) and mtDNA

SEQ ID NO: 72763 - DNA, 120 bp, Homo sapiens
  misc_feature: 696 for SV(C|O) and mtDNA
actactaatcaacgcccataatcatacaaagcccccgcaccaataggatcctcccgaatcaaccctgacccctctccttcataaattattcagcttcctacactattaaagtttaccaca

SEQ ID NO: 72764 - DNA, 120 bp, Homo sapiens
  misc_feature: 696 for SV(C|O) and mtDNA
tgcaatgagcgattttaggtctgtttgtcgtaggcagatggagcttgttataattatgcctcatagggatagtacaaggaaggggtaggctatgtgttttgtcagggggttgagaatgag

SEQ ID NO: 72765 - DNA, 120 bp, Homo sapiens; identical to SEQ ID NO: 57442
  misc_feature: 696 for SV(C|O) and mtDNA

SEQ ID NO: 72766 - DNA, 120 bp, Homo sapiens
  misc_feature: 696 for SV(C|O) and mtDNA
tcgttccacagaagctgccatcaagtatttcctcacgcaagcaaccgcatccataatccttctaatagctatcctcttcaacaatatactctccggacaatgaaccataaccaatactac

SEQ ID NO: 72767 - DNA, 120 bp, Homo sapiens; identical to SEQ ID NO: 53353
  misc_feature: 696 for SV(C|O) and mtDNA

SEQ ID NO: 72768 - DNA, 120 bp, Homo sapiens
  misc_feature: 696 for SV(C|O) and mtDNA
gtagatagaaaccgacctggattactccggtctgaactcagatcacgtaggactttaatcgttgaacaaacgaacctttaatagcggctgcaccatcgggatgtcctgatccaacatcga

SEQ ID NO: 72769 - DNA, 120 bp, Homo sapiens
  misc_feature: 696 for SV(C|O) and mtDNA
tcctatttattacctcagaagtttttttcttcgcaggatttttctgagccttttaccactccagcctagcccctaccccccaattaggagggcactggcccccaacaggcatcaccccgc

SEQ ID NO: 72770 - DNA, 120 bp, Homo sapiens
  misc_feature: 696 for SV(C|O) and mtDNA
tccataaacctggagtgactatatggatgccccccaccctaccacacattcgaagaacccgtatacataaaatctagacaaaaaaggaaggaatcgaaccccccaaagctggtttcaagc

SEQ ID NO: 72771 - DNA, 120 bp, Homo sapiens
  misc_feature: 696 for SV(C|O) and mtDNA
tcattgcatactcttcaatcagccacatagccctcgtagtaacagccattctcatccaaaccccctgaagcttcaccggcgcagtcattctcataatcgcccacggacttacatcctcat

SEQ ID NO: 72772 - DNA, 120 bp, Homo sapiens
  misc_feature: 696 for SV(C|O) and mtDNA
tattgcaacttactgagggctttgaaggctcttggtctgtatttaacctaaatttctataagattattagtataaaaggggagataggtaggagtagcgtggtaagggcgatgagtgtgg

SEQ ID NO: 72773 - DNA, 120 bp, Homo sapiens; identical to SEQ ID NO: 56906
  misc_feature: 696 for SV(C|O) and mtDNA

SEQ ID NO: 72774 - DNA, 120 bp, Homo sapiens
  misc_feature: 696 for SV(C|O) and mtDNA
tactattgacccagcgatgggggcttcgacatgggctttagggagtcataagtggagtccgtaaagaggtatctttactataaaagctattgtgtaagctagtcatattaagttgttggc

SEQ ID NO: 72775 - DNA, 120 bp, Homo sapiens
  misc_feature: 696 for SV(C|O) and mtDNA
cactggcccccaacaggcatcaccccgctaaatcccctagaagtcccactcctaaacacatccgtattactcgcatcaggagtatcaatcacctgagctcaccatagtctaatagaaaac

SEQ ID NO: 72776 - DNA, 120 bp, Homo sapiens; identical to SEQ ID NO: 56738
  misc_feature: 696 for SV(C|O) and mtDNA

SEQ ID NO: 72777 - DNA, 120 bp, Homo sapiens
  misc_feature: 696 for SV(C|O) and mtDNA
gtctaggccatatgtgttggagattgagactagtagggctaggcccaccgctgcttcgcaggcggcaaagactagtatggcaataggcacaatattggctaagagggagtgggtgttgag

SEQ ID NO: 72778 - DNA, 120 bp, Homo sapiens
  misc_feature: 696 for SV(C|O) and mtDNA
ggttgattcgggaggatcctattggtgcgggggctttgtatgattatgggcgttgattagtagtagttactggttgaacattgtttgttggtgtatatattgtaattgagattgctcggg

SEQ ID NO: 72779 - DNA, 120 bp, Homo sapiens; identical to SEQ ID NO: 58245
  misc_feature: 696 for SV(C|O) and mtDNA

SEQ ID NO: 72780 - DNA, 120 bp, Homo sapiens
  misc_feature: 696 for SV(C|O) and mtDNA
ccccactatgcacattttatttctccaacatactcggattctaccctaccatcacacaccgcacaatcccctatctaggccttcttacgagccaaaacctgcccctactcctcctagacc

SEQ ID NO: 72781 - DNA, 120 bp, Homo sapiens
  misc_feature: 696 for SV(C|O) and mtDNA
ggggaacagctaaataggttgttgttgatttggttaaaaaatagtagagggatgatgctaataattaggctgtgggtggttgtgttgattcaaattatgtgttttttggaaagtcatgtc

SEQ ID NO: 72782 - DNA, 120 bp, Homo sapiens
  misc_feature: 696 for SV(C|O) and mtDNA
gcaaactcatcactagacatcgtactacacgacacgtactacgttgtagctcacttccactatgtcctatcaataggagctgtatttgccatcataggaggcttcattcactgatttccc

SEQ ID NO: 72783 - DNA, 120 bp, Homo sapiens; identical to SEQ ID NO: 55813
  misc_feature: 696 for SV(C|O) and mtDNA

SEQ ID NO: 72784 - DNA, 120 bp, Homo sapiens
  misc_feature: 696 for SV(C|O) and mtDNA
agcacattacagtcaaatcccttctcgtccccatggatgacccccctcagataggggtcccttgaccaccatcctccgtgaaatcaatatcccgcacaagagtgctactctcctcgctcc

SEQ ID NO: 72785 - DNA, 120 bp, Homo sapiens
  misc_feature: 696 for SV(C|O) and mtDNA
ggagcaccctatgtcgcagtatctgtctttgattcctgcctcatcctattatttatcgcacctacgttcaatattacagacgaacatacttactaaagtgtgttaattaattaatgcttg

SEQ ID NO: 72786 - DNA, 120 bp, Homo sapiens; identical to SEQ ID NO: 54866
  misc_feature: 696 for SV(C|O) and mtDNA

SEQ ID NO: 72787 - DNA, 120 bp, Homo sapiens
  misc_feature: 696 for SV(C|O) and mtDNA
gcgattagaatgggtacaatgaggagtaggaggttggccatgggtatgttgttaagaagaggaattgaacctctgactgtaaagttttaagttttatgcgattaccgggctctgccatct

SEQ ID NO: 72788 - DNA, 120 bp, Homo sapiens; identical to SEQ ID NO: 55519
  misc_feature: 696 for SV(C|O) and mtDNA

SEQ ID NO: 72789 - DNA, 120 bp, Homo sapiens
  misc_feature: 696 for SV(C|O) and mtDNA
gatgaaggctacaaagtaagcgcaagtacccacgtaaagacgttaggtcaaggtgtagcccatgaggtggcaagaaatgggctacattttctaccccagaaaactacgatagcccttatg

SEQ ID NO: 72790 - DNA, 120 bp, Homo sapiens
  misc_feature: 696 for SV(C|O) and mtDNA
ccacccaagaacagggtttgttaagatggcagagcccggtaatcgcataaaacttaaaactttacagtcagaggttcaattcctcttcttaacaacatacccatggccaacctcctactc

SEQ ID NO: 72791 - DNA, 120 bp, Homo sapiens
  misc_feature: 696 for SV(C|O) and mtDNA
agttagcagttcttgtgagctttctcggtaaataaggggtcgtaagcctctgttgtcagattcacaatctgatgttttggttaaactatatttacaagaggaaaacccggtaatgatgtc

SEQ ID NO: 72792 - DNA, 120 bp, Homo sapiens
  misc_feature: 696 for SV(C|O) and mtDNA
cttatgcggaggagaatgttttcatgttacttatactaacattagttcttctatagggtgatagattggtccaattgggtgtgaggagttcagttatatgtttgggattttttaggtagt

SEQ ID NO: 72793 - DNA, 120 bp, Homo sapiens
  misc_feature: 696 for SV(C|O) and mtDNA
ctgttatccctagggtaacttgttccgttggtcaagttattggatcaattgagtatagtagttcgctttgactggtgaagtcttagcatgtactgctcggaggttgggttctgctccgag

SEQ ID NO: 72794 - DNA, 120 bp, Homo sapiens
  misc_feature: 696 for SV(C|O) and mtDNA
acatagcacattacagtcaaatcccttctcgtccccatggatgacccccctcagataggggtcccttgaccaccatcctccgtgaaatcaatatcccgcacaagagtgctactctcctcg

SEQ ID NO: 72795 - DNA, 120 bp, Homo sapiens
  misc_feature: 696 for SV(C|O) and mtDNA
attgcaacttactgagggctttgaaggctcttggtctgtatttaacctaaatttctataagattattagtataaaaggggagataggtaggagtagcgtggtaagggcgatgagtgtggg

SEQ ID NO: 72796 - DNA, 120 bp, Homo sapiens
  misc_feature: 696 for SV(C|O) and mtDNA
catgtggtgtatgcatcggggtagtccgagtaacgtcggggcattccggataggccgagaaagtgttgtgggaagaaagttagatttacgccgatgaatatgatagtgaaatggattttg

SEQ ID NO: 72797 - DNA, 120 bp, Homo sapiens; identical to SEQ ID NO: 53964
  misc_feature: 696 for SV(C|O) and mtDNA

SEQ ID NO: 72798 - DNA, 120 bp, Homo sapiens
  misc_feature: 696 for SV(C|O) and mtDNA
attataaccaagcataatacagcaaggactaacccctataccttctgcataatgaattaactagaaataactttgcaaggagagccaaagctaagacccccgaaaccagacgagctacct

SEQ ID NO: 72799 - DNA, 120 bp, Homo sapiens
  misc_feature: 696 for SV(C|O) and mtDNA
agcgggggcaggcctcctagggagaggagggtggatggaattaagggtgttagtcatgttagcttgtttcaggtgcgagatagtagtagggtcgtggtgctggagtttaagttgagtagt

SEQ ID NO: 72800 - DNA, 120 bp, Homo sapiens
  misc_feature: 696 for SV(C|O) and mtDNA
aatgaggagtaggaggttggccatgggtatgttgttaagaagaggaattgaacctctgactgtaaagttttaagttttatgcgattaccgggctctgccatcttaacaaaccctgttctt

SEQ ID NO: 72801 - DNA, 120 bp, Homo sapiens; identical to SEQ ID NO: 59157
  misc_feature: 695 for SV(C|O) and mtDNA

SEQ ID NO: 72802 - DNA, 120 bp, Homo sapiens
  misc_feature: 695 for SV(C|O) and mtDNA
tttggacactaggaaaaaaccttgtagagagagtaaaaaatttaacacccatagtaggcctaaaagcagccaccaattaagaaagcgttcaagctcaacacccactacctaaaaaatccc

SEQ ID NO: 72803 - DNA, 120 bp, Homo sapiens; identical to SEQ ID NO: 61146
  misc_feature: 695 for SV(C|O) and mtDNA

SEQ ID NO: 72804 - DNA, 120 bp, Homo sapiens
  misc_feature: 695 for SV(C|O) and mtDNA
tttaaattagaatcttagctttgggtgctaatggtggagttaaagactttttctctgatttgtccttggaaaaaggttttcatctccggtttacaagactggtgtattagtttatactac

SEQ ID NO: 72805 - DNA, 120 bp, Homo sapiens; identical to SEQ ID NO: 56595
  misc_feature: 695 for SV(C|O) and mtDNA

SEQ ID NO: 72806 - DNA, 120 bp, Homo sapiens
  misc_feature: 695 for SV(C|O) and mtDNA
acaaccttagccaaaccatttacccaaataaagtataggcgatagaaattgaaacctggcgcaatagatatagtaccgcaagggaaagatgaaaaattataaccaagcataatacagcaa

SEQ ID NO: 72807 - DNA, 120 bp, Homo sapiens; identical to SEQ ID NO: 55342
  misc_feature: 695 for SV(C|O) and mtDNA

SEQ ID NO: 72808 - DNA, 120 bp, Homo sapiens
  misc_feature: 695 for SV(C|O) and mtDNA
ttaaccttttaagttaaagattaagagaaccaacacctctttacagtgaaatgccccaactaaatactaccgtatggcccaccataattacccccatactccttacactattcctcatca

SEQ ID NO: 72809 - DNA, 120 bp, Homo sapiens
  misc_feature: 695 for SV(C|O) and mtDNA
attatgtcctacaagcattaattaattaacacactttagtaagtatgttcgtctgtaatattgaacgtaggtgcgataaataataggatgaggcaggaatcaaagacagatactgcgaca

SEQ ID NO: 72810 - DNA, 120 bp, Homo sapiens; identical to SEQ ID NO: 57896
  misc_feature: 695 for SV(C|O) and mtDNA

SEQ ID NO: 72811 - DNA, 120 bp, Homo sapiens
  misc_feature: 695 for SV(C|O) and mtDNA
tctccaacatactcggattctaccctaccatcacacaccgcacaatcccctatctaggccttcttacgagccaaaacctgcccctactcctcctagacctaacctgactagaaaagctat

SEQ ID NO: 72812 - DNA, 120 bp, Homo sapiens; identical to SEQ ID NO: 55381
  misc_feature: 695 for SV(C|O) and mtDNA

SEQ ID NO: 72813 - DNA, 120 bp, Homo sapiens
  misc_feature: 695 for SV(C|O) and mtDNA
tagatttacagtccaatgcttcactcagccattttacctcacccccactgatgttcgccgaccgttgactattctctacaaaccacaaagacattggaacactatacctattattcggcg

SEQ ID NO: 72814 - DNA, 120 bp, Homo sapiens
  misc_feature: 695 for SV(C|O) and mtDNA
ggagtcataagtggagtccgtaaagaggtatctttactataaaagctattgtgtaagctagtcatattaagttgttggctcaggagtttgatagttcttgggcagtgagagtgagtagta

SEQ ID NO: 72815 - DNA, 120 bp, Homo sapiens
  misc_feature: 695 for SV(C|O) and mtDNA
agagagagtaaaaaatttaacacccatagtaggcctaaaagcagccaccaattaagaaagcgttcaagctcaacacccactacctaaaaaatcccaaacatataactgaactcctcacac

SEQ ID NO: 72816 - DNA, 120 bp, Homo sapiens
  misc_feature: 695 for SV(C|O) and mtDNA
gcagcggtgggcctagccctactagtctcaatctccaacacatatggcctagactacgtacataacctaaacctactccaatgctaaaactaatcgtcccaacaattatattactaccac

SEQ ID NO: 72817 - DNA, 120 bp, Homo sapiens
  misc_feature: 695 for SV(C|O) and mtDNA
gtatcctagtgggtgaggggtggctttggagttgcagttgatgtgtgatagttgagggttgattgctgtacttgcttgtaagcatggggagggggttttgatgtggattgggtttttatg

SEQ ID NO: 72818 - DNA, 120 bp, Homo sapiens
  misc_feature: 695 for SV(C|O) and mtDNA
gaaatatgtctgataaaagagttactttgatagagtaaataataggagcttaaacccccttatttctaggactatgagaatcgaacccatccctgagaatccaaaattctccgtgccacc

SEQ ID NO: 72819 - DNA, 120 bp, Homo sapiens
  misc_feature: 695 for SV(C|O) and mtDNA
ctatccattggtcttaggccccaaaaattttggtgcaactccaaataaaagtaacaaccatgcacactactataaccaccctaaccctgacttccctaattccccccatccttaccaccc

SEQ ID NO: 72820 - DNA, 120 bp, Homo sapiens
  misc_feature: 695 for SV(C|O) and mtDNA
gggggaatgctggagattgtaatgggtatggagacatatcatataagtaatgctagggtgagtggtaggaagttttttcataggaggtgtatgagttggtcgtagcggaatcgggggtat

SEQ ID NO: 72821 - DNA, 120 bp, Homo sapiens; identical to SEQ ID NO: 55785
  misc_feature: 695 for SV(C|O) and mtDNA

SEQ ID NO: 72822 - DNA, 120 bp, Homo sapiens; identical to SEQ ID NO: 60603
  misc_feature: 695 for SV(C|O) and mtDNA

SEQ ID NO: 72823 - DNA, 120 bp, Homo sapiens; identical to SEQ ID NO: 61370
  misc_feature: 695 for SV(C|O) and mtDNA

SEQ ID NO: 72824 - DNA, 120 bp, Homo sapiens
  misc_feature: 695 for SV(C|O) and mtDNA
gatgtaagtccgtgggcgattatgagaatgactgcgccggtgaagcttcagggggtttggatgagaatggctgttactacgagggctatgtggctgattgaagagtatgcaatgagcgat

SEQ ID NO: 72825 - DNA, 120 bp, Homo sapiens; identical to SEQ ID NO: 51909
  misc_feature: 695 for SV(C|O) and mtDNA

SEQ ID NO: 72826 - DNA, 120 bp, Homo sapiens
  misc_feature: 695 for SV(C|O) and mtDNA
cttatgagcgggcgcagtgattataggctttcgctctaagattaaaaatgccctagcccacttcttaccacaaggcacacctacaccccttatccccatactagttattatcgaaaccat

SEQ ID NO: 72827 - DNA, 120 bp, Homo sapiens
  misc_feature: 695 for SV(C|O) and mtDNA
ctccaacatactcggattctaccctaccatcacacaccgcacaatcccctatctaggccttcttacgagccaaaacctgcccctactcctcctagacctaacctgactagaaaagctatt

SEQ ID NO: 72828 - DNA, 120 bp, Homo sapiens
  misc_feature: 695 for SV(C|O) and mtDNA
atgggctttagggagtcataagtggagtccgtaaagaggtatctttactataaaagctattgtgtaagctagtcatattaagttgttggctcaggagtttgatagttcttgggcagtgag

SEQ ID NO: 72829 - DNA, 120 bp, Homo sapiens
  misc_feature: 695 for SV(C|O) and mtDNA
catagtggggtatctaatcccagtttgggtcttagctattgtgtgttcagatatgttaaagccactttcgtagtctattttgtgtcagctggagttttttacaactcaggtgagttttag

SEQ ID NO: 72830 - DNA, 120 bp, Homo sapiens; identical to SEQ ID NO: 52246
  misc_feature: 695 for SV(C|O) and mtDNA

SEQ ID NO: 72831 - DNA, 120 bp, Homo sapiens; identical to SEQ ID NO: 57344
  misc_feature: 695 for SV(C|O) and mtDNA

SEQ ID NO: 72832 - DNA, 120 bp, Homo sapiens; identical to SEQ ID NO: 53164
  misc_feature: 695 for SV(C|O) and mtDNA

SEQ ID NO: 72833 - DNA, 120 bp, Homo sapiens; identical to SEQ ID NO: 52235
  misc_feature: 695 for SV(C|O) and mtDNA

SEQ ID NO: 72834 - DNA, 120 bp, Homo sapiens
  misc_feature: 695 for SV(C|O) and mtDNA
acaacgttggggcctttgcgtagttgtatatagcctagaatttttcgttcggtaagcattaggaatgccattgcgattagaatgggtacaatgaggagtaggaggttggccatgggtatg

SEQ ID NO: 72835 - DNA, 120 bp, Homo sapiens; identical to SEQ ID NO: 57588
  misc_feature: 695 for SV(C|O) and mtDNA

SEQ ID NO: 72836 - DNA, 120 bp, Homo sapiens
  misc_feature: 695 for SV(C|O) and mtDNA
atgtaagtccgtgggcgattatgagaatgactgcgccggtgaagcttcagggggtttggatgagaatggctgttactacgagggctatgtggctgattgaagagtatgcaatgagcgatt

SEQ ID NO: 72837 - DNA, 120 bp, Homo sapiens; identical to SEQ ID NO: 56425
  misc_feature: 695 for SV(C|O) and mtDNA

SEQ ID NO: 72838 - DNA, 120 bp, Homo sapiens; identical to SEQ ID NO: 55922
  misc_feature: 695 for SV(C|O) and mtDNA

SEQ ID NO: 72839 - DNA, 120 bp, Homo sapiens
  misc_feature: 695 for SV(C|O) and mtDNA
aaactcatcactagacatcgtactacacgacacgtactacgttgtagctcacttccactatgtcctatcaataggagctgtatttgccatcataggaggcttcattcactgatttcccct

SEQ ID NO: 72840 - DNA, 120 bp, Homo sapiens
  misc_feature: 695 for SV(C|O) and mtDNA
agccattatgattattaatgatgagtattgattggtagtattggttatggttcattgtccggagagtatattgttgaagaggatagctattagaaggattatggatgcggttgcttgcgt

SEQ ID NO: 72841 - DNA, 120 bp, Homo sapiens; identical to SEQ ID NO: 58130
  misc_feature: 695 for SV(C|O) and mtDNA

SEQ ID NO: 72842 - DNA, 120 bp, Homo sapiens
  misc_feature: 695 for SV(C|O) and mtDNA
acaacataaaaccctcattcacacgagaaaacaccctcatgttcatacacctatcccccattctcctcctatccctcaaccccgacatcattaccgggttttcctcttgtaaatatagtt

SEQ ID NO: 72843 - DNA, 120 bp, Homo sapiens
  misc_feature: 694 for SV(C|O) and mtDNA
caaaaattttggtgcaactccaaataaaagtaacaaccatgcacactactataaccaccctaaccctgacttccctaattccccccatccttaccaccctcgttaaccctaacaaaaaaa

SEQ ID NO: 72844 - DNA, 120 bp, Homo sapiens
  misc_feature: 694 for SV(C|O) and mtDNA
agcttttctagtcaggttaggtctaggaggagtaggggcaggttttggctcgtaagaaggcctagataggggattgtgcggtgtgtgatggtagggtagaatccgagtatgttggagaaa

SEQ ID NO: 72845 - DNA, 120 bp, Homo sapiens; identical to SEQ ID NO: 58159
  misc_feature: 694 for SV(C|O) and mtDNA

SEQ ID NO: 72846 - DNA, 120 bp, Homo sapiens; identical to SEQ ID NO: 62211
  misc_feature: 694 for SV(C|O) and mtDNA

SEQ ID NO: 72847 - DNA, 120 bp, Homo sapiens
  misc_feature: 694 for SV(C|O) and mtDNA
ataaacctggagtgactatatggatgccccccaccctaccacacattcgaagaacccgtatacataaaatctagacaaaaaaggaaggaatcgaaccccccaaagctggtttcaagccaa

SEQ ID NO: 72848 - DNA, 120 bp, Homo sapiens
  misc_feature: 694 for SV(C|O) and mtDNA
ttgagggggaatgctggagattgtaatgggtatggagacatatcatataagtaatgctagggtgagtggtaggaagttttttcataggaggtgtatgagttggtcgtagcggaatcgggg

SEQ ID NO: 72849 - DNA, 120 bp, Homo sapiens
  misc_feature: 694 for SV(C|O) and mtDNA
cctccataaacctggagtgactatatggatgccccccaccctaccacacattcgaagaacccgtatacataaaatctagacaaaaaaggaaggaatcgaaccccccaaagctggtttcaa

SEQ ID NO: 72850 - DNA, 120 bp, Homo sapiens
  misc_feature: 694 for SV(C|O) and mtDNA
ttatgagcgggcgcagtgattataggctttcgctctaagattaaaaatgccctagcccacttcttaccacaaggcacacctacaccccttatccccatactagttattatcgaaaccatc

SEQ ID NO: 72851 - DNA, 120 bp, Homo sapiens
  misc_feature: 694 for SV(C|O) and mtDNA
taggatgaggatggatagtaatagggcaaggacgcctcctagtttgttagggacggatcggagaattgtgtaggcgaataggaaatatcattcgggcttgatgtggggaggggtgtttaa

SEQ ID NO: 72852 - DNA, 120 bp, Homo sapiens; identical to SEQ ID NO: 61766
  misc_feature: 694 for SV(C|O) and mtDNA

SEQ ID NO: 72853 - DNA, 120 bp, Homo sapiens; identical to SEQ ID NO: 62213
  misc_feature: 694 for SV(C|O) and mtDNA

SEQ ID NO: 72854 - DNA, 120 bp, Homo sapiens
  misc_feature: 694 for SV(C|O) and mtDNA
tgtaagtccgtgggcgattatgagaatgactgcgccggtgaagcttcagggggtttggatgagaatggctgttactacgagggctatgtggctgattgaagagtatgcaatgagcgattt

SEQ ID NO: 72855 - DNA, 120 bp, Homo sapiens
  misc_feature: 694 for SV(C|O) and mtDNA
gatttacagtccaatgcttcactcagccattttacctcacccccactgatgttcgccgaccgttgactattctctacaaaccacaaagacattggaacactatacctattattcggcgca

SEQ ID NO: 72856 - DNA, 120 bp, Homo sapiens
  misc_feature: 694 for SV(C|O) and mtDNA
gggaacagctaaataggttgttgttgatttggttaaaaaatagtagagggatgatgctaataattaggctgtgggtggttgtgttgattcaaattatgtgttttttggaaagtcatgtca

SEQ ID NO: 72857 - DNA, 120 bp, Homo sapiens
  misc_feature: 694 for SV(C|O) and mtDNA
tcgtgcaggtagaggcttactagaagtgtgaaaacgtaggcttggattaaggcgacagcgatttctaggatagtcagtagaattagaattgtgaagatgataagtgtagagggaaggtta

SEQ ID NO: 72858 - DNA, 120 bp, Homo sapiens; identical to SEQ ID NO: 56864
  misc_feature: 694 for SV(C|O) and mtDNA

SEQ ID NO: 72859 - DNA, 120 bp, Homo sapiens
  misc_feature: 694 for SV(C|O) and mtDNA
tccaacatactcggattctaccctaccatcacacaccgcacaatcccctatctaggccttcttacgagccaaaacctgcccctactcctcctagacctaacctgactagaaaagctatta

SEQ ID NO: 72860 - DNA, 120 bp, Homo sapiens; identical to SEQ ID NO: 55990
  misc_feature: 694 for SV(C|O) and mtDNA

SEQ ID NO: 72861 - DNA, 120 bp, Homo sapiens; identical to SEQ ID NO: 56195
  misc_feature: 694 for SV(C|O) and mtDNA

SEQ ID NO: 72862 - DNA, 120 bp, Homo sapiens
  misc_feature: 694 for SV(C|O) and mtDNA
gactgtaatgtgctatgtacggtaaatggctttatgtactatgtgctgttaagggtgagtaggtttgttggtatcctagtgggtgaggggtggctttggagttgcagttgatgtgtgata

SEQ ID NO: 72863 - DNA, 120 bp, Homo sapiens
  misc_feature: 694 for SV(C|O) and mtDNA
aggtctgtttgtcgtaggcagatggagcttgttataattatgcctcatagggatagtacaaggaaggggtaggctatgtgttttgtcagggggttgagaatgagtgtgaggcgtattata

SEQ ID NO: 72864 - DNA, 120 bp, Homo sapiens
  misc_feature: 694 for SV(C|O) and mtDNA
gatagcattgcgagacgctggagccggagcaccctatgtcgcagtatctgtctttgattcctgcctcatcctattatttatcgcacctacgttcaatattacagacgaacatacttacta

SEQ ID NO: 72865 - DNA, 120 bp, Homo sapiens
  misc_feature: 694 for SV(C|O) and mtDNA
gcgggggcaggcctcctagggagaggagggtggatggaattaagggtgttagtcatgttagcttgtttcaggtgcgagatagtagtagggtcgtggtgctggagtttaagttgagtagta

SEQ ID NO: 72866 - DNA, 120 bp, Homo sapiens
  misc_feature: 694 for SV(C|O) and mtDNA
tacaaagtaagcgcaagtacccacgtaaagacgttaggtcaaggtgtagcccatgaggtggcaagaaatgggctacattttctaccccagaaaactacgatagcccttatgaaacttaag

SEQ ID NO: 72867 - DNA, 120 bp, Homo sapiens
  misc_feature: 694 for SV(C|O) and mtDNA
gtggtgatttggaggatcaggcaggcgccaaggagtgagccgaagtttcatcatgcggagatgttggatggggtggggaggtcgatgaatgagtggttaattaattttattagggggtta

SEQ ID NO: 72868 - DNA, 120 bp, Homo sapiens
  misc_feature: 694 for SV(C|O) and mtDNA
gttatccctagggtaacttgttccgttggtcaagttattggatcaattgagtatagtagttcgctttgactggtgaagtcttagcatgtactgctcggaggttgggttctgctccgaggt

SEQ ID NO: 72869 - DNA, 120 bp, Homo sapiens
  misc_feature: 694 for SV(C|O) and mtDNA
gtctgaactcagatcacgtaggactttaatcgttgaacaaacgaacctttaatagcggctgcaccatcgggatgtcctgatccaacatcgaggtcgtaaaccctattgttgatatggact

SEQ ID NO: 72870 - DNA, 120 bp, Homo sapiens; identical to SEQ ID NO: 53356
  misc_feature: 694 for SV(C|O) and mtDNA

SEQ ID NO: 72871 - DNA, 120 bp, Homo sapiens; identical to SEQ ID NO: 61453
  misc_feature: 694 for SV(C|O) and mtDNA

SEQ ID NO: 72872 - DNA, 120 bp, Homo sapiens
  misc_feature: 694 for SV(C|O) and mtDNA
ggtctgtttgtcgtaggcagatggagcttgttataattatgcctcatagggatagtacaaggaaggggtaggctatgtgttttgtcagggggttgagaatgagtgtgaggcgtattatac

SEQ ID NO: 72873 - DNA, 120 bp, Homo sapiens
  misc_feature: 694 for SV(C|O) and mtDNA
gtactattgacccagcgatgggggcttcgacatgggctttagggagtcataagtggagtccgtaaagaggtatctttactataaaagctattgtgtaagctagtcatattaagttgttgg

SEQ ID NO: 72874 - DNA, 120 bp, Homo sapiens
  misc_feature: 694 for SV(C|O) and mtDNA
gctttagggagtcataagtggagtccgtaaagaggtatctttactataaaagctattgtgtaagctagtcatattaagttgttggctcaggagtttgatagttcttgggcagtgagagtg

SEQ ID NO: 72875 - DNA, 120 bp, Homo sapiens
  misc_feature: 694 for SV(C|O) and mtDNA
gcggaggagaatgttttcatgttacttatactaacattagttcttctatagggtgatagattggtccaattgggtgtgaggagttcagttatatgtttgggattttttaggtagtgggtg

SEQ ID NO: 72876 - DNA, 120 bp, Homo sapiens; identical to SEQ ID NO: 58783
  misc_feature: 694 for SV(C|O) and mtDNA

SEQ ID NO: 72877 - DNA, 120 bp, Homo sapiens; identical to SEQ ID NO: 55998
  misc_feature: 694 for SV(C|O) and mtDNA

SEQ ID NO: 72878 - DNA, 120 bp, Homo sapiens; identical to SEQ ID NO: 58068
  misc_feature: 694 for SV(C|O) and mtDNA

SEQ ID NO: 72879 - DNA, 120 bp, Homo sapiens
  misc_feature: 694 for SV(C|O) and mtDNA
cggaggagaatgttttcatgttacttatactaacattagttcttctatagggtgatagattggtccaattgggtgtgaggagttcagttatatgtttgggattttttaggtagtgggtgt

SEQ ID NO: 72880 - DNA, 120 bp, Homo sapiens; identical to SEQ ID NO: 53438
  misc_feature: 694 for SV(C|O) and mtDNA

SEQ ID NO: 72881 - DNA, 120 bp, Homo sapiens; identical to SEQ ID NO: 61765
  misc_feature: 694 for SV(C|O) and mtDNA

SEQ ID NO: 72882 - DNA, 120 bp, Homo sapiens; identical to SEQ ID NO: 55250
  misc_feature: 694 for SV(C|O) and mtDNA

SEQ ID NO: 72883 - DNA, 120 bp, Homo sapiens
  misc_feature: 694 for SV(C|O) and mtDNA
cctaacaaactaggaggcgtccttgccctattactatccatcctcatcctagcaataatccccatcctccatatatccaaacaacaaagcataatatttcgcccactaagccaatcactt

SEQ ID NO: 72884 - DNA, 120 bp, Homo sapiens
  misc_feature: 694 for SV(C|O) and mtDNA
ccggtctgaactcagatcacgtaggactttaatcgttgaacaaacgaacctttaatagcggctgcaccatcgggatgtcctgatccaacatcgaggtcgtaaaccctattgttgatatgg

SEQ ID NO: 72885 - DNA, 120 bp, Homo sapiens
  misc_feature: 694 for SV(C|O) and mtDNA
aataatcataatggctatagcaataaaactaggaatagccccctttcacttctgggtcccagaggttacccaaggcacccctctgacatccggcctgcttcttctcacatgacaaaaact

SEQ ID NO: 72886 - DNA, 120 bp, Homo sapiens; identical to SEQ ID NO: 55759
  misc_feature: 694 for SV(C|O) and mtDNA

SEQ ID NO: 72887 - DNA, 120 bp, Homo sapiens; identical to SEQ ID NO: 56331
  misc_feature: 694 for SV(C|O) and mtDNA

SEQ ID NO: 72888 - DNA, 120 bp, Homo sapiens
  misc_feature: 693 for SV(C|O) and mtDNA
cccaaaaattttggtgcaactccaaataaaagtaacaaccatgcacactactataaccaccctaaccctgacttccctaattccccccatccttaccaccctcgttaaccctaacaaaaa

SEQ ID NO: 72889 - DNA, 120 bp, Homo sapiens; identical to SEQ ID NO: 55795
  misc_feature: 693 for SV(C|O) and mtDNA

SEQ ID NO: 72890 - DNA, 120 bp, Homo sapiens
  misc_feature: 693 for SV(C|O) and mtDNA
tttatgggggtttagtattgattgttagcggtgtggtcgggtgtgttattattctgaattttgggggaggttatatgggtttaatagtttttttaatttatttagggggaatgatggttg

SEQ ID NO: 72891 - DNA, 120 bp, Homo sapiens
  misc_feature: 693 for SV(C|O) and mtDNA
ttgttaagaagaggaattgaacctctgactgtaaagttttaagttttatgcgattaccgggctctgccatcttaacaaaccctgttcttgggtgggtgtgggtataatactaagttgaga

SEQ ID NO: 72892 - DNA, 120 bp, Homo sapiens
  misc_feature: 693 for SV(C|O) and mtDNA
ttgcgtagttgtatatagcctagaatttttcgttcggtaagcattaggaatgccattgcgattagaatgggtacaatgaggagtaggaggttggccatgggtatgttgttaagaagagga

SEQ ID NO: 72893 - DNA, 120 bp, Homo sapiens
  misc_feature: 693 for SV(C|O) and mtDNA
ttagggagtcataagtggagtccgtaaagaggtatctttactataaaagctattgtgtaagctagtcatattaagttgttggctcaggagtttgatagttcttgggcagtgagagtgagt

SEQ ID NO: 72894 - DNA, 120 bp, Homo sapiens; identical to SEQ ID NO: 57893
  misc_feature: 693 for SV(C|O) and mtDNA

SEQ ID NO: 72895 - DNA, 120 bp, Homo sapiens; identical to SEQ ID NO: 56118
  misc_feature: 693 for SV(C|O) and mtDNA

SEQ ID NO: 72896 - DNA, 120 bp, Homo sapiens
  misc_feature: 693 for SV(C|O) and mtDNA
tccagcctagcccctaccccccaattaggagggcactggcccccaacaggcatcaccccgctaaatcccctagaagtcccactcctaaacacatccgtattactcgcatcaggagtatca

SEQ ID NO: 72897 - DNA, 120 bp, Homo sapiens; identical to SEQ ID NO: 60002
  misc_feature: 693 for SV(C|O) and mtDNA

SEQ ID NO: 72898 - DNA, 120 bp, Homo sapiens
  misc_feature: 693 for SV(C|O) and mtDNA
ccctccataaacctggagtgactatatggatgccccccaccctaccacacattcgaagaacccgtatacataaaatctagacaaaaaaggaaggaatcgaaccccccaaagctggtttca

SEQ ID NO: 72899 - DNA, 120 bp, Homo sapiens
  misc_feature: 693 for SV(C|O) and mtDNA
tctttcacccacagcaccaatcctacctccatcgctaaccccactaaaacactcaccaagacctcaacccctgacccccatgcctcaggatactcctcaatagccatcgctgtagtatat

SEQ ID NO: 72900 - DNA, 120 bp, Homo sapiens
  misc_feature: 693 for SV(C|O) and mtDNA
tctgaactcagatcacgtaggactttaatcgttgaacaaacgaacctttaatagcggctgcaccatcgggatgtcctgatccaacatcgaggtcgtaaaccctattgttgatatggactc

SEQ ID NO: 72901 - DNA, 120 bp, Homo sapiens
  misc_feature: 693 for SV(C|O) and mtDNA
tctacaaaccacaaagacattggaacactatacctattattcggcgcatgagctggagtcctaggcacagctctaagcctccttattcgagccgagctgggccagccaggcaaccttcta

SEQ ID NO: 72902 - DNA, 120 bp, Homo sapiens; identical to SEQ ID NO: 55965
  misc_feature: 693 for SV(C|O) and mtDNA

SEQ ID NO: 72903 - DNA, 120 bp, Homo sapiens; identical to SEQ ID NO: 57634
  misc_feature: 693 for SV(C|O) and mtDNA

SEQ ID NO: 72904 - DNA, 120 bp, Homo sapiens; identical to SEQ ID NO: 57567
  misc_feature: 693 for SV(C|O) and mtDNA

SEQ ID NO: 72905 - DNA, 120 bp, Homo sapiens
  misc_feature: 693 for SV(C|O) and mtDNA
tagcccctaccccccaattaggagggcactggcccccaacaggcatcaccccgctaaatcccctagaagtcccactcctaaacacatccgtattactcgcatcaggagtatcaatcacct

SEQ ID NO: 72906 - DNA, 120 bp, Homo sapiens; identical to SEQ ID NO: 55265
  misc_feature: 693 for SV(C|O) and mtDNA

SEQ ID NO: 72907 - DNA, 120 bp, Homo sapiens
  misc_feature: 693 for SV(C|O) and mtDNA
aatggggctcactcacccaccacattaacaacataaaaccctcattcacacgagaaaacaccctcatgttcatacacctatcccccattctcctcctatccctcaaccccgacatcatta

SEQ ID NO: 72908 - DNA, 120 bp, Homo sapiens
  misc_feature: 693 for SV(C|O) and mtDNA
taagaagaggaattgaacctctgactgtaaagttttaagttttatgcgattaccgggctctgccatcttaacaaaccctgttcttgggtgggtgtgggtataatactaagttgagatgat

SEQ ID NO: 72909 - DNA, 120 bp, Homo sapiens
  misc_feature: 693 for SV(C|O) and mtDNA
taacaacataaaaccctcattcacacgagaaaacaccctcatgttcatacacctatcccccattctcctcctatccctcaaccccgacatcattaccgggttttcctcttgtaaatatag

SEQ ID NO: 72910 - DNA, 120 bp, Homo sapiens
  misc_feature: 693 for SV(C|O) and mtDNA
ctaggatgaggatggatagtaatagggcaaggacgcctcctagtttgttagggacggatcggagaattgtgtaggcgaataggaaatatcattcgggcttgatgtggggaggggtgttta

SEQ ID NO: 72911 - DNA, 120 bp, Homo sapiens
  misc_feature: 693 for SV(C|O) and mtDNA
ccccttatgagcgggcgcagtgattataggctttcgctctaagattaaaaatgccctagcccacttcttaccacaaggcacacctacaccccttatccccatactagttattatcgaaac

SEQ ID NO: 72912 - DNA, 120 bp, Homo sapiens
  misc_feature: 693 for SV(C|O) and mtDNA
cgcagtactcttaaaactaggcggctatggtataatacgcctcacactcattctcaaccccctgacaaaacacatagcctaccccttccttgtactatccctatgaggcataattataac

SEQ ID NO: 72913 - DNA, 120 bp, Homo sapiens; identical to SEQ ID NO: 56545
  misc_feature: 693 for SV(C|O) and mtDNA

SEQ ID NO: 72914 - DNA, 120 bp, Homo sapiens; identical to SEQ ID NO: 53857
  misc_feature: 693 for SV(C|O) and mtDNA

SEQ ID NO: 72915 - DNA, 120 bp, Homo sapiens
  misc_feature: 693 for SV(C|O) and mtDNA
acccacccaagaacagggtttgttaagatggcagagcccggtaatcgcataaaacttaaaactttacagtcagaggttcaattcctcttcttaacaacatacccatggccaacctcctac

SEQ ID NO: 72916 - DNA, 120 bp, Homo sapiens; identical to SEQ ID NO: 61657
  misc_feature: 693 for SV(C|O) and mtDNA

SEQ ID NO: 72917 - DNA, 120 bp, Homo sapiens
  misc_feature: 693 for SV(C|O) and mtDNA
aaccacccaactatctataaacctagccatggccatccccttatgagcgggcgcagtgattataggctttcgctctaagattaaaaatgccctagcccacttcttaccacaaggcacacc

SEQ ID NO: 72918 - DNA, 120 bp, Homo sapiens; identical to SEQ ID NO: 55836
  misc_feature: 693 for SV(C|O) and mtDNA

SEQ ID NO: 72919 - DNA, 120 bp, Homo sapiens
  misc_feature: 693 for SV(C|O) and mtDNA
ggggaatgctggagattgtaatgggtatggagacatatcatataagtaatgctagggtgagtggtaggaagttttttcataggaggtgtatgagttggtcgtagcggaatcgggggtatg

SEQ ID NO: 72920 - DNA, 120 bp, Homo sapiens
  misc_feature: 693 for SV(C|O) and mtDNA
gggaatgctggagattgtaatgggtatggagacatatcatataagtaatgctagggtgagtggtaggaagttttttcataggaggtgtatgagttggtcgtagcggaatcgggggtatgc

SEQ ID NO: 72921 - DNA, 120 bp, Homo sapiens
  misc_feature: 693 for SV(C|O) and mtDNA
cattgcgattagaatgggtacaatgaggagtaggaggttggccatgggtatgttgttaagaagaggaattgaacctctgactgtaaagttttaagttttatgcgattaccgggctctgcc

SEQ ID NO: 72922 - DNA, 120 bp, Homo sapiens
  misc_feature: 693 for SV(C|O) and mtDNA
agacaaccttagccaaaccatttacccaaataaagtataggcgatagaaattgaaacctggcgcaatagatatagtaccgcaagggaaagatgaaaaattataaccaagcataatacagc

SEQ ID NO: 72923 - DNA, 120 bp, Homo sapiens
  misc_feature: 693 for SV(C|O) and mtDNA
gccgtcggaaatggtgaagggagactcgaagtactctgaggcttgtaggagggtaaaatagagacccagtaaaattgtaataagcagtgcttgaattatttggtttcggttgttttctat

SEQ ID NO: 72924 - DNA, 120 bp, Homo sapiens
  misc_feature: 693 for SV(C|O) and mtDNA
gccgcactcgtaaggggtggatttttctatgtagccgttgagttgtggtagtcaaaatgtaataattattagtagtaaggctaggagggtgttgattattaaaattaaggcgaagtttat

SEQ ID NO: 72925 - DNA, 120 bp, Homo sapiens
  misc_feature: 693 for SV(C|O) and mtDNA
ctcattcacacgagaaaacaccctcatgttcatacacctatcccccattctcctcctatccctcaaccccgacatcattaccgggttttcctcttgtaaatatagtttaaccaaaacatc

SEQ ID NO: 72926 - DNA, 120 bp, Homo sapiens
  misc_feature: 693 for SV(C|O) and mtDNA
gatgggggctagtttttgtcatgtgagaagaagcaggccggatgtcagaggggtgccttgggtaacctctgggacccagaagtgaaagggggctattcctagttttattgctatagccat

SEQ ID NO: 72927 - DNA, 120 bp, Homo sapiens; identical to SEQ ID NO: 54237
  misc_feature: 693 for SV(C|O) and mtDNA

SEQ ID NO: 72928 - DNA, 120 bp, Homo sapiens; identical to SEQ ID NO: 56386
  misc_feature: 693 for SV(C|O) and mtDNA

SEQ ID NO: 72929 - DNA, 120 bp, Homo sapiens
  misc_feature: 693 for SV(C|O) and mtDNA
aatagggtttacgacctcgatgttggatcaggacatcccgatggtgcagccgctattaaaggttcgtttgttcaacgattaaagtcctacgtgatctgagttcagaccggagtaatccag

SEQ ID NO: 72930 - DNA, 120 bp, Homo sapiens; identical to SEQ ID NO: 54984
  misc_feature: 693 for SV(C|O) and mtDNA

SEQ ID NO: 72931 - DNA, 120 bp, Homo sapiens; identical to SEQ ID NO: 57821
  misc_feature: 693 for SV(C|O) and mtDNA

SEQ ID NO: 72932 - DNA, 120 bp, Homo sapiens
  misc_feature: 693 for SV(C|O) and mtDNA
agcccctaccccccaattaggagggcactggcccccaacaggcatcaccccgctaaatcccctagaagtcccactcctaaacacatccgtattactcgcatcaggagtatcaatcacctg

SEQ ID NO: 72933 - DNA, 120 bp, Homo sapiens
  misc_feature: 693 for SV(C|O) and mtDNA
aaccacgtctacaaaatgccagtatcaggcggcggcttcgaagccaaagtgatgtttggatgtaaagtgaaatattagttggcggatgaagcagatagtgaggaaagttgagccaataat

SEQ ID NO: 72934 - DNA, 120 bp, Homo sapiens; identical to SEQ ID NO: 55181
  misc_feature: 693 for SV(C|O) and mtDNA

SEQ ID NO: 72935 - DNA, 120 bp, Homo sapiens
  misc_feature: 693 for SV(C|O) and mtDNA
aaggttggggaacagctaaataggttgttgttgatttggttaaaaaatagtagagggatgatgctaataattaggctgtgggtggttgtgttgattcaaattatgtgttttttggaaagt

SEQ ID NO: 72936 - DNA, 120 bp, Homo sapiens; identical to SEQ ID NO: 53846
  misc_feature: 693 for SV(C|O) and mtDNA

SEQ ID NO: 72937 - DNA, 120 bp, Homo sapiens
  misc_feature: 693 for SV(C|O) and mtDNA
aaactccagctgacacaaaatagactacgaaagtggctttaacatatctgaacacacaatagctaagacccaaactgggattagataccccactatgcttagccctaaacctcaacagtt

SEQ ID NO: 72938 - DNA, 120 bp, Homo sapiens
  misc_feature: 692 for SV(C|O) and mtDNA
ctactaatcaacgcccataatcatacaaagcccccgcaccaataggatcctcccgaatcaaccctgacccctctccttcataaattattcagcttcctacactattaaagtttaccacaa

SEQ ID NO: 72939 - DNA, 120 bp, Homo sapiens; identical to SEQ ID NO: 57002
  misc_feature: 692 for SV(C|O) and mtDNA

SEQ ID NO: 72940 - DNA, 120 bp, Homo sapiens; identical to SEQ ID NO: 55287
  misc_feature: 692 for SV(C|O) and mtDNA

SEQ ID NO: 72941 - DNA, 120 bp, Homo sapiens; identical to SEQ ID NO: 57798
  misc_feature: 692 for SV(C|O) and mtDNA

SEQ ID NO: 72942 - DNA, 120 bp, Homo sapiens; identical to SEQ ID NO: 61775
  misc_feature: 692 for SV(C|O) and mtDNA

SEQ ID NO: 72943 - DNA, 120 bp, Homo sapiens; identical to SEQ ID NO: 56217
  misc_feature: 692 for SV(C|O) and mtDNA

SEQ ID NO: 72944 - DNA, 120 bp, Homo sapiens
  misc_feature: 692 for SV(C|O) and mtDNA
agcagcggtgggcctagccctactagtctcaatctccaacacatatggcctagactacgtacataacctaaacctactccaatgctaaaactaatcgtcccaacaattatattactacca

SEQ ID NO: 72945 - DNA, 120 bp, Homo sapiens
  misc_feature: 692 for SV(C|O) and mtDNA
tagtattatacccacacccacccaagaacagggtttgttaagatggcagagcccggtaatcgcataaaacttaaaactttacagtcagaggttcaattcctcttcttaacaacataccca

SEQ ID NO: 72946 - DNA, 120 bp, Homo sapiens; identical to SEQ ID NO: 61542
  misc_feature: 692 for SV(C|O) and mtDNA

SEQ ID NO: 72947 - DNA, 120 bp, Homo sapiens
  misc_feature: 692 for SV(C|O) and mtDNA
tgagatgttagtattagttagttttgttgtgagtgttaggaaaagggcatacaggactaggaagcagataaggaaaatgattatgagggcgtgatcatgaaaggtgataagctcttctat

SEQ ID NO: 72948 - DNA, 120 bp, Homo sapiens; identical to SEQ ID NO: 58554
  misc_feature: 692 for SV(C|O) and mtDNA

SEQ ID NO: 72949 - DNA, 120 bp, Homo sapiens; identical to SEQ ID NO: 53374
  misc_feature: 692 for SV(C|O) and mtDNA

SEQ ID NO: 72950 - DNA, 120 bp, Homo sapiens
  misc_feature: 692 for SV(C|O) and mtDNA
tccggtctgaactcagatcacgtaggactttaatcgttgaacaaacgaacctttaatagcggctgcaccatcgggatgtcctgatccaacatcgaggtcgtaaaccctattgttgatatg

SEQ ID NO: 72951 - DNA, 120 bp, Homo sapiens; identical to SEQ ID NO: 59490
  misc_feature: 692 for SV(C|O) and mtDNA

SEQ ID NO: 72952 - DNA, 120 bp, Homo sapiens
  misc_feature: 692 for SV(C|O) and mtDNA
aagaagaggaattgaacctctgactgtaaagttttaagttttatgcgattaccgggctctgccatcttaacaaaccctgttcttgggtgggtgtgggtataatactaagttgagatgata

SEQ ID NO: 72953 - DNA, 120 bp, Homo sapiens
  misc_feature: 692 for SV(C|O) and mtDNA
tatagccattatgattattaatgatgagtattgattggtagtattggttatggttcattgtccggagagtatattgttgaagaggatagctattagaaggattatggatgcggttgcttg

SEQ ID NO: 72954 - DNA, 120 bp, Homo sapiens
  misc_feature: 692 for SV(C|O) and mtDNA
ctacaacgttggggcctttgcgtagttgtatatagcctagaatttttcgttcggtaagcattaggaatgccattgcgattagaatgggtacaatgaggagtaggaggttggccatgggta

SEQ ID NO: 72955 - DNA, 120 bp, Homo sapiens
  misc_feature: 692 for SV(C|O) and mtDNA
cccactccaccttactaccagacaaccttagccaaaccatttacccaaataaagtataggcgatagaaattgaaacctggcgcaatagatatagtaccgcaagggaaagatgaaaaatta

SEQ ID NO: 72956 - DNA, 120 bp, Homo sapiens
  misc_feature: 692 for SV(C|O) and mtDNA
cattaggaatgccattgcgattagaatgggtacaatgaggagtaggaggttggccatgggtatgttgttaagaagaggaattgaacctctgactgtaaagttttaagttttatgcgatta

SEQ ID NO: 72957 - DNA, 120 bp, Homo sapiens; identical to SEQ ID NO: 55354
  misc_feature: 692 for SV(C|O) and mtDNA

SEQ ID NO: 72958 - DNA, 120 bp, Homo sapiens
  misc_feature: 692 for SV(C|O) and mtDNA
taagcattaggaatgccattgcgattagaatgggtacaatgaggagtaggaggttggccatgggtatgttgttaagaagaggaattgaacctctgactgtaaagttttaagttttatgcg

SEQ ID NO: 72959 - DNA, 120 bp, Homo sapiens; identical to SEQ ID NO: 58174
  misc_feature: 692 for SV(C|O) and mtDNA

SEQ ID NO: 72960 - DNA, 120 bp, Homo sapiens; identical to SEQ ID NO: 56909
  misc_feature: 692 for SV(C|O) and mtDNA

SEQ ID NO: 72961 - DNA, 120 bp, Homo sapiens; identical to SEQ ID NO: 54579
  misc_feature: 692 for SV(C|O) and mtDNA

SEQ ID NO: 72962 - DNA, 120 bp, Homo sapiens; identical to SEQ ID NO: 60546
  misc_feature: 692 for SV(C|O) and mtDNA

SEQ ID NO: 72963 - DNA, 120 bp, Homo sapiens
  misc_feature: 692 for SV(C|O) and mtDNA
ccaccataattacccccatactccttacactattcctcatcacccaactaaaaatattaaacacaaactaccacctacctccctcaccaaagcccataaaaataaaaaattataacaaac

SEQ ID NO: 72964 - DNA, 120 bp, Homo sapiens
  misc_feature: 692 for SV(C|O) and mtDNA
aaggctacaaagtaagcgcaagtacccacgtaaagacgttaggtcaaggtgtagcccatgaggtggcaagaaatgggctacattttctaccccagaaaactacgatagcccttatgaaac

SEQ ID NO: 72965 - DNA, 120 bp, Homo sapiens
  misc_feature: 692 for SV(C|O) and mtDNA
gttagcagttcttgtgagctttctcggtaaataaggggtcgtaagcctctgttgtcagattcacaatctgatgttttggttaaactatatttacaagaggaaaacccggtaatgatgtcg

SEQ ID NO: 72966 - DNA, 120 bp, Homo sapiens
  misc_feature: 692 for SV(C|O) and mtDNA
gtattgcaacttactgagggctttgaaggctcttggtctgtatttaacctaaatttctataagattattagtataaaaggggagataggtaggagtagcgtggtaagggcgatgagtgtg

SEQ ID NO: 72967 - DNA, 120 bp, Homo sapiens
  misc_feature: 692 for SV(C|O) and mtDNA
ggttagcgggggcaggcctcctagggagaggagggtggatggaattaagggtgttagtcatgttagcttgtttcaggtgcgagatagtagtagggtcgtggtgctggagtttaagttgag

SEQ ID NO: 72968 - DNA, 120 bp, Homo sapiens
  misc_feature: 692 for SV(C|O) and mtDNA
ctagcccctaccccccaattaggagggcactggcccccaacaggcatcaccccgctaaatcccctagaagtcccactcctaaacacatccgtattactcgcatcaggagtatcaatcacc

SEQ ID NO: 72969 - DNA, 120 bp, Homo sapiens; identical to SEQ ID NO: 57612
  misc_feature: 692 for SV(C|O) and mtDNA

SEQ ID NO: 72970 - DNA, 120 bp, Homo sapiens
  misc_feature: 692 for SV(C|O) and mtDNA
gggttgattcgggaggatcctattggtgcgggggctttgtatgattatgggcgttgattagtagtagttactggttgaacattgtttgttggtgtatatattgtaattgagattgctcgg

SEQ ID NO: 72971 - DNA, 120 bp, Homo sapiens; identical to SEQ ID NO: 61818
  misc_feature: 692 for SV(C|O) and mtDNA

SEQ ID NO: 72972 - DNA, 120 bp, Homo sapiens; identical to SEQ ID NO: 56519
  misc_feature: 692 for SV(C|O) and mtDNA

SEQ ID NO: 72973 - DNA, 120 bp, Homo sapiens
  misc_feature: 692 for SV(C|O) and mtDNA
cacccaagaacagggtttgttaagatggcagagcccggtaatcgcataaaacttaaaactttacagtcagaggttcaattcctcttcttaacaacatacccatggccaacctcctactcc

SEQ ID NO: 72974 - DNA, 120 bp, Homo sapiens
  misc_feature: 692 for SV(C|O) and mtDNA
ggaatgctggagattgtaatgggtatggagacatatcatataagtaatgctagggtgagtggtaggaagttttttcataggaggtgtatgagttggtcgtagcggaatcgggggtatgct

SEQ ID NO: 72975 - DNA, 120 bp, Homo sapiens
  misc_feature: 692 for SV(C|O) and mtDNA
ggaacagctaaataggttgttgttgatttggttaaaaaatagtagagggatgatgctaataattaggctgtgggtggttgtgttgattcaaattatgtgttttttggaaagtcatgtcag

SEQ ID NO: 72976 - DNA, 120 bp, Homo sapiens
  misc_feature: 692 for SV(C|O) and mtDNA
agatgccaacacagcagccattcaagcaatcctatacaaccgtatcggcgatatcggtttcatcctcgccttagcatgatttatcctacactccaactcatgagacccacaacaaatagc

SEQ ID NO: 72977 - DNA, 120 bp, Homo sapiens
  misc_feature: 692 for SV(C|O) and mtDNA
gctagtttttgtcatgtgagaagaagcaggccggatgtcagaggggtgccttgggtaacctctgggacccagaagtgaaagggggctattcctagttttattgctatagccattatgatt

SEQ ID NO: 72978 - DNA, 120 bp, Homo sapiens
  misc_feature: 692 for SV(C|O) and mtDNA
gcctttgcgtagttgtatatagcctagaatttttcgttcggtaagcattaggaatgccattgcgattagaatgggtacaatgaggagtaggaggttggccatgggtatgttgttaagaag

SEQ ID NO: 72979 - DNA, 120 bp, Homo sapiens; identical to SEQ ID NO: 54867
  misc_feature: 692 for SV(C|O) and mtDNA

SEQ ID NO: 72980 - DNA, 120 bp, Homo sapiens; identical to SEQ ID NO: 57317
  misc_feature: 692 for SV(C|O) and mtDNA

SEQ ID NO: 72981 - DNA, 120 bp, Homo sapiens; identical to SEQ ID NO: 53930
  misc_feature: 692 for SV(C|O) and mtDNA

SEQ ID NO: 72982 - DNA, 120 bp, Homo sapiens
  misc_feature: 692 for SV(C|O) and mtDNA
atgcggaggagaatgttttcatgttacttatactaacattagttcttctatagggtgatagattggtccaattgggtgtgaggagttcagttatatgtttgggattttttaggtagtggg

SEQ ID NO: 72983 - DNA, 120 bp, Homo sapiens
  misc_feature: 692 for SV(C|O) and mtDNA
acccaagaacagggtttgttaagatggcagagcccggtaatcgcataaaacttaaaactttacagtcagaggttcaattcctcttcttaacaacatacccatggccaacctcctactcct

SEQ ID NO: 72984 - DNA, 120 bp, Homo sapiens; identical to SEQ ID NO: 54161
  misc_feature: 692 for SV(C|O) and mtDNA

SEQ ID NO: 72985 - DNA, 120 bp, Homo sapiens; identical to SEQ ID NO: 52498
  misc_feature: 691 for SV(C|O) and mtDNA

SEQ ID NO: 72986 - DNA, 120 bp, Homo sapiens
  misc_feature: 691 for SV(C|O) and mtDNA
ttttatttggagttgcaccaaaatttttggggcctaagaccaatggatagctgttatcctttaaaagttgagaaagccatgttgttagacatgggggcatgagttagcagttcttgtgag

SEQ ID NO: 72987 - DNA, 120 bp, Homo sapiens
  misc_feature: 691 for SV(C|O) and mtDNA
tttgcgtagttgtatatagcctagaatttttcgttcggtaagcattaggaatgccattgcgattagaatgggtacaatgaggagtaggaggttggccatgggtatgttgttaagaagagg

SEQ ID NO: 72988 - DNA, 120 bp, Homo sapiens; identical to SEQ ID NO: 52728
  misc_feature: 691 for SV(C|O) and mtDNA

SEQ ID NO: 72989 - DNA, 120 bp, Homo sapiens; identical to SEQ ID NO: 54852
  misc_feature: 691 for SV(C|O) and mtDNA

SEQ ID NO: 72990 - DNA, 120 bp, Homo sapiens
  misc_feature: 691 for SV(C|O) and mtDNA
ttggtggctgcttttaggcctactatgggtgttaaattttttactctctctacaaggttttttcctagtgtccaaagagctgttcctctttggactaacagttaaatttacaaggggatt

SEQ ID NO: 72991 - DNA, 120 bp, Homo sapiens
  misc_feature: 691 for SV(C|O) and mtDNA
ttggtcttaggccccaaaaattttggtgcaactccaaataaaagtaacaaccatgcacactactataaccaccctaaccctgacttccctaattccccccatccttaccaccctcgttaa

SEQ ID NO: 72992 - DNA, 120 bp, Homo sapiens
  misc_feature: 691 for SV(C|O) and mtDNA
ttgcaacttactgagggctttgaaggctcttggtctgtatttaacctaaatttctataagattattagtataaaaggggagataggtaggagtagcgtggtaagggcgatgagtgtgggg

SEQ ID NO: 72993 - DNA, 120 bp, Homo sapiens
  misc_feature: 691 for SV(C|O) and mtDNA
tgcgtagttgtatatagcctagaatttttcgttcggtaagcattaggaatgccattgcgattagaatgggtacaatgaggagtaggaggttggccatgggtatgttgttaagaagaggaa

SEQ ID NO: 72994 - DNA, 120 bp, Homo sapiens; identical to SEQ ID NO: 55187
  misc_feature: 691 for SV(C|O) and mtDNA

SEQ ID NO: 72995 - DNA, 120 bp, Homo sapiens
  misc_feature: 691 for SV(C|O) and mtDNA
tgttggagattgagactagtagggctaggcccaccgctgcttcgcaggcggcaaagactagtatggcaataggcacaatattggctaagagggagtgggtgttgagggttatgagagtag

SEQ ID NO: 72996 - DNA, 120 bp, Homo sapiens
  misc_feature: 691 for SV(C|O) and mtDNA
ccctagcccacttcttaccacaaggcacacctacaccccttatccccatactagttattatcgaaaccatcagcctactcattcaaccaatagccctggccgtacgcctaaccgctaaca

SEQ ID NO: 72997 - DNA, 120 bp, Homo sapiens; identical to SEQ ID NO: 57687
  misc_feature: 691 for SV(C|O) and mtDNA

SEQ ID NO: 72998 - DNA, 120 bp, Homo sapiens
  misc_feature: 691 for SV(C|O) and mtDNA
attcacacgagaaaacaccctcatgttcatacacctatcccccattctcctcctatccctcaaccccgacatcattaccgggttttcctcttgtaaatatagtttaaccaaaacatcaga

SEQ ID NO: 72999 - DNA, 120 bp, Homo sapiens
  misc_feature: 691 for SV(C|O) and mtDNA
agtcataagtggagtccgtaaagaggtatctttactataaaagctattgtgtaagctagtcatattaagttgttggctcaggagtttgatagttcttgggcagtgagagtgagtagtaga

SEQ ID NO: 73000 - DNA, 120 bp, Homo sapiens
  misc_feature: 691 for SV(C|O) and mtDNA
tctaccctaccatcacacaccgcacaatcccctatctaggccttcttacgagccaaaacctgcccctactcctcctagacctaacctgactagaaaagctattacctaaaacaatttcac

SEQ ID NO: 73001 - DNA, 120 bp, Homo sapiens
  misc_feature: 691 for SV(C|O) and mtDNA
ccacacattcgaagaacccgtatacataaaatctagacaaaaaaggaaggaatcgaaccccccaaagctggtttcaagccaaccccatggcctccatgactttttcaaaaaggtattaga

SEQ ID NO: 73002 - DNA, 120 bp, Homo sapiens
  misc_feature: 691 for SV(C|O) and mtDNA
accctatgtcgcagtatctgtctttgattcctgcctcatcctattatttatcgcacctacgttcaatattacagacgaacatacttactaaagtgtgttaattaattaatgcttgtagga

SEQ ID NO: 73003 - DNA, 120 bp, Homo sapiens
  misc_feature: 691 for SV(C|O) and mtDNA
ataattacccccatactccttacactattcctcatcacccaactaaaaatattaaacacaaactaccacctacctccctcaccaaagcccataaaaataaaaaattataacaaaccctga

SEQ ID NO: 73004 - DNA, 120 bp, Homo sapiens; identical to SEQ ID NO: 61592
  misc_feature: 691 for SV(C|O) and mtDNA

SEQ ID NO: 73005 - DNA, 120 bp, Homo sapiens; identical to SEQ ID NO: 57929
  misc_feature: 691 for SV(C|O) and mtDNA

SEQ ID NO: 73006 - DNA, 120 bp, Homo sapiens; identical to SEQ ID NO: 56016
  misc_feature: 691 for SV(C|O) and mtDNA

SEQ ID NO: 73007 - DNA, 120 bp, Homo sapiens
  misc_feature: 691 for SV(C|O) and mtDNA
tatagtttaaacaaaacgaatgatttcgactcattaaattatgataatcatatttaccaaatgcccctcatttacataaatattatactagcatttaccatctcacttctaggaatacta

SEQ ID NO: 73008 - DNA, 120 bp, Homo sapiens
  misc_feature: 691 for SV(C|O) and mtDNA
ccacccaactatctataaacctagccatggccatccccttatgagcgggcgcagtgattataggctttcgctctaagattaaaaatgccctagcccacttcttaccacaaggcacaccta

SEQ ID NO: 73009 - DNA, 120 bp, Homo sapiens; identical to SEQ ID NO: 57409
  misc_feature: 691 for SV(C|O) and mtDNA

SEQ ID NO: 73010 - DNA, 120 bp, Homo sapiens
  misc_feature: 691 for SV(C|O) and mtDNA
taccgtacatagcacattacagtcaaatcccttctcgtccccatggatgacccccctcagataggggtcccttgaccaccatcctccgtgaaatcaatatcccgcacaagagtgctactc

SEQ ID NO: 73011 - DNA, 120 bp, Homo sapiens; identical to SEQ ID NO: 57447
  misc_feature: 691 for SV(C|O) and mtDNA

SEQ ID NO: 73012 - DNA, 120 bp, Homo sapiens; identical to SEQ ID NO: 57724
  misc_feature: 691 for SV(C|O) and mtDNA

SEQ ID NO: 73013 - DNA, 120 bp, Homo sapiens; identical to SEQ ID NO: 61684
  misc_feature: 691 for SV(C|O) and mtDNA

SEQ ID NO: 73014 - DNA, 120 bp, Homo sapiens; identical to SEQ ID NO: 54094
  misc_feature: 691 for SV(C|O) and mtDNA

SEQ ID NO: 73015 - DNA, 120 bp, Homo sapiens
  misc_feature: 691 for SV(C|O) and mtDNA
ggtatgttgttaagaagaggaattgaacctctgactgtaaagttttaagttttatgcgattaccgggctctgccatcttaacaaaccctgttcttgggtgggtgtgggtataatactaag

SEQ ID NO: 73016 - DNA, 120 bp, Homo sapiens
  misc_feature: 691 for SV(C|O) and mtDNA
aacacaaagcacccaacttacacttaggagatttcaacttaacttgaccgctctgagctaaacctagccccaaacccactccaccttactaccagacaaccttagccaaaccatttaccc

SEQ ID NO: 73017 - DNA, 120 bp, Homo sapiens
  misc_feature: 691 for SV(C|O) and mtDNA
ggcgcaatagatatagtaccgcaagggaaagatgaaaaattataaccaagcataatacagcaaggactaacccctataccttctgcataatgaattaactagaaataactttgcaaggag

SEQ ID NO: 73018 - DNA, 120 bp, Homo sapiens
  misc_feature: 691 for SV(C|O) and mtDNA
ggcatgagttagcagttcttgtgagctttctcggtaaataaggggtcgtaagcctctgttgtcagattcacaatctgatgttttggttaaactatatttacaagaggaaaacccggtaat

SEQ ID NO: 73019 - DNA, 120 bp, Homo sapiens; identical to SEQ ID NO: 56024
  misc_feature: 691 for SV(C|O) and mtDNA

SEQ ID NO: 73020 - DNA, 120 bp, Homo sapiens
  misc_feature: 691 for SV(C|O) and mtDNA
ggaatgccattgcgattagaatgggtacaatgaggagtaggaggttggccatgggtatgttgttaagaagaggaattgaacctctgactgtaaagttttaagttttatgcgattaccggg

SEQ ID NO: 73021 - DNA, 120 bp, Homo sapiens
  misc_feature: 691 for SV(C|O) and mtDNA
ggaaatcagtgaatgaagcctcctatgatggcaaatacagctcctattgataggacatagtggaagtgagctacaacgtagtacgtgtcgtgtagtacgatgtctagtgatgagtttgct

SEQ ID NO: 73022 - DNA, 120 bp, Homo sapiens
  misc_feature: 691 for SV(C|O) and mtDNA
gcttttctagtcaggttaggtctaggaggagtaggggcaggttttggctcgtaagaaggcctagataggggattgtgcggtgtgtgatggtagggtagaatccgagtatgttggagaaat

SEQ ID NO: 73023 - DNA, 120 bp, Homo sapiens
  misc_feature: 691 for SV(C|O) and mtDNA
attatacccacacccacccaagaacagggtttgttaagatggcagagcccggtaatcgcataaaacttaaaactttacagtcagaggttcaattcctcttcttaacaacatacccatggc

SEQ ID NO: 73024 - DNA, 120 bp, Homo sapiens
  misc_feature: 691 for SV(C|O) and mtDNA
aacaatagggtttacgacctcgatgttggatcaggacatcccgatggtgcagccgctattaaaggttcgtttgttcaacgattaaagtcctacgtgatctgagttcagaccggagtaatc

SEQ ID NO: 73025 - DNA, 120 bp, Homo sapiens
  misc_feature: 691 for SV(C|O) and mtDNA
gatgaggatggatagtaatagggcaaggacgcctcctagtttgttagggacggatcggagaattgtgtaggcgaataggaaatatcattcgggcttgatgtggggaggggtgtttaaggg

SEQ ID NO: 73026 - DNA, 120 bp, Homo sapiens
  misc_feature: 691 for SV(C|O) and mtDNA
caacatctccgcatgatgaaacttcggctcactccttggcgcctgcctgatcctccaaatcaccacaggactattcctagccatgcactactcaccagacgcctcaaccgccttttcatc

SEQ ID NO: 73027 - DNA, 120 bp, Homo sapiens
  misc_feature: 691 for SV(C|O) and mtDNA
ccgtacatagcacattacagtcaaatcccttctcgtccccatggatgacccccctcagataggggtcccttgaccaccatcctccgtgaaatcaatatcccgcacaagagtgctactctc

SEQ ID NO: 73028 - DNA, 120 bp, Homo sapiens; identical to SEQ ID NO: 57247
  misc_feature: 691 for SV(C|O) and mtDNA

SEQ ID NO: 73029 - DNA, 120 bp, Homo sapiens; identical to SEQ ID NO: 54456
  misc_feature: 691 for SV(C|O) and mtDNA

SEQ ID NO: 73030 - DNA, 120 bp, Homo sapiens
  misc_feature: 691 for SV(C|O) and mtDNA
cattcacacgagaaaacaccctcatgttcatacacctatcccccattctcctcctatccctcaaccccgacatcattaccgggttttcctcttgtaaatatagtttaaccaaaacatcag

SEQ ID NO: 73031 - DNA, 120 bp, Homo sapiens
  misc_feature: 691 for SV(C|O) and mtDNA
cctgatgaaggctacaaagtaagcgcaagtacccacgtaaagacgttaggtcaaggtgtagcccatgaggtggcaagaaatgggctacattttctaccccagaaaactacgatagccctt

SEQ ID NO: 73032 - DNA, 120 bp, Homo sapiens; identical to SEQ ID NO: 55584
  misc_feature: 691 for SV(C|O) and mtDNA

SEQ ID NO: 73033 - DNA, 120 bp, Homo sapiens; identical to SEQ ID NO: 59699
  misc_feature: 691 for SV(C|O) and mtDNA

SEQ ID NO: 73034 - DNA, 120 bp, Homo sapiens
  misc_feature: 691 for SV(C|O) and mtDNA
attaacaacataaaaccctcattcacacgagaaaacaccctcatgttcatacacctatcccccattctcctcctatccctcaaccccgacatcattaccgggttttcctcttgtaaatat

SEQ ID NO: 73035 - DNA, 120 bp, Homo sapiens
  misc_feature: 691 for SV(C|O) and mtDNA
atactagtataccgctcacacctcatatcctccctactatgcctagaaggaataatactatcactgttcattatagctactctcataaccctcaacacccactccctcttagccaatatt

SEQ ID NO: 73036 - DNA, 120 bp, Homo sapiens; identical to SEQ ID NO: 55564
  misc_feature: 690 for SV(C|O) and mtDNA

SEQ ID NO: 73037 - DNA, 120 bp, Homo sapiens; identical to SEQ ID NO: 53659
  misc_feature: 690 for SV(C|O) and mtDNA

SEQ ID NO: 73038 - DNA, 120 bp, Homo sapiens; identical to SEQ ID NO: 60562
  misc_feature: 690 for SV(C|O) and mtDNA

SEQ ID NO: 73039 - DNA, 120 bp, Homo sapiens
  misc_feature: 690 for SV(C|O) and mtDNA
ttagtattagttagttttgttgtgagtgttaggaaaagggcatacaggactaggaagcagataaggaaaatgattatgagggcgtgatcatgaaaggtgataagctcttctatgataggg

SEQ ID NO: 73040 - DNA, 120 bp, Homo sapiens
  misc_feature: 690 for SV(C|O) and mtDNA
ttaccgtacatagcacattacagtcaaatcccttctcgtccccatggatgacccccctcagataggggtcccttgaccaccatcctccgtgaaatcaatatcccgcacaagagtgctact

SEQ ID NO: 73041 - DNA, 120 bp, Homo sapiens; identical to SEQ ID NO: 54357
  misc_feature: 690 for SV(C|O) and mtDNA

SEQ ID NO: 73042 - DNA, 120 bp, Homo sapiens
  misc_feature: 690 for SV(C|O) and mtDNA
ccctcatgttcatacacctatcccccattctcctcctatccctcaaccccgacatcattaccgggttttcctcttgtaaatatagtttaaccaaaacatcagattgtgaatctgacaaca

SEQ ID NO: 73043 - DNA, 120 bp, Homo sapiens
  misc_feature: 690 for SV(C|O) and mtDNA
ccttatgagcgggcgcagtgattataggctttcgctctaagattaaaaatgccctagcccacttcttaccacaaggcacacctacaccccttatccccatactagttattatcgaaacca

SEQ ID NO: 73044 - DNA, 120 bp, Homo sapiens
  misc_feature: 690 for SV(C|O) and mtDNA
gttaacgagggtggtaaggatggggggaattagggaagtcagggttagggtggttatagtagtgtgcatggttgttacttttatttggagttgcaccaaaatttttggggcctaagacca

SEQ ID NO: 73045 - DNA, 120 bp, Homo sapiens
  misc_feature: 690 for SV(C|O) and mtDNA
tgggctttagggagtcataagtggagtccgtaaagaggtatctttactataaaagctattgtgtaagctagtcatattaagttgttggctcaggagtttgatagttcttgggcagtgaga

SEQ ID NO: 73046 - DNA, 120 bp, Homo sapiens; identical to SEQ ID NO: 57712
  misc_feature: 690 for SV(C|O) and mtDNA

SEQ ID NO: 73047 - DNA, 120 bp, Homo sapiens
  misc_feature: 690 for SV(C|O) and mtDNA
ctcattgcatactcttcaatcagccacatagccctcgtagtaacagccattctcatccaaaccccctgaagcttcaccggcgcagtcattctcataatcgcccacggacttacatcctca

SEQ ID NO: 73048 - DNA, 120 bp, Homo sapiens; identical to SEQ ID NO: 61348
  misc_feature: 690 for SV(C|O) and mtDNA

SEQ ID NO: 73049 - DNA, 120 bp, Homo sapiens
  misc_feature: 690 for SV(C|O) and mtDNA
atgcaatgagcgattttaggtctgtttgtcgtaggcagatggagcttgttataattatgcctcatagggatagtacaaggaaggggtaggctatgtgttttgtcagggggttgagaatga

SEQ ID NO: 73050 - DNA, 120 bp, Homo sapiens
  misc_feature: 690 for SV(C|O) and mtDNA
gggctagtttttgtcatgtgagaagaagcaggccggatgtcagaggggtgccttgggtaacctctgggacccagaagtgaaagggggctattcctagttttattgctatagccattatga

SEQ ID NO: 73051 - DNA, 120 bp, Homo sapiens
  misc_feature: 690 for SV(C|O) and mtDNA
gcccctaccccccaattaggagggcactggcccccaacaggcatcaccccgctaaatcccctagaagtcccactcctaaacacatccgtattactcgcatcaggagtatcaatcacctga

SEQ ID NO: 73052 - DNA, 120 bp, Homo sapiens
  misc_feature: 690 for SV(C|O) and mtDNA
tatgttgttaagaagaggaattgaacctctgactgtaaagttttaagttttatgcgattaccgggctctgccatcttaacaaaccctgttcttgggtgggtgtgggtataatactaagtt

SEQ ID NO: 73053 - DNA, 120 bp, Homo sapiens; identical to SEQ ID NO: 53587
  misc_feature: 690 for SV(C|O) and mtDNA

SEQ ID NO: 73054 - DNA, 120 bp, Homo sapiens
  misc_feature: 690 for SV(C|O) and mtDNA
ctaaaacactcaccaagacctcaacccctgacccccatgcctcaggatactcctcaatagccatcgctgtagtatatccaaagacaaccatcattccccctaaataaattaaaaaaacta

SEQ ID NO: 73055 - DNA, 120 bp, Homo sapiens
  misc_feature: 690 for SV(C|O) and mtDNA
agcaccctatgtcgcagtatctgtctttgattcctgcctcatcctattatttatcgcacctacgttcaatattacagacgaacatacttactaaagtgtgttaattaattaatgcttgta

SEQ ID NO: 73056 - DNA, 120 bp, Homo sapiens
  misc_feature: 690 for SV(C|O) and mtDNA
taataatcataatggctatagcaataaaactaggaatagccccctttcacttctgggtcccagaggttacccaaggcacccctctgacatccggcctgcttcttctcacatgacaaaaac

SEQ ID NO: 73057 - DNA, 120 bp, Homo sapiens
  misc_feature: 690 for SV(C|O) and mtDNA
aactccagctgacacaaaatagactacgaaagtggctttaacatatctgaacacacaatagctaagacccaaactgggattagataccccactatgcttagccctaaacctcaacagtta

SEQ ID NO: 73058 - DNA, 120 bp, Homo sapiens
  misc_feature: 690 for SV(C|O) and mtDNA
cccttatgagcgggcgcagtgattataggctttcgctctaagattaaaaatgccctagcccacttcttaccacaaggcacacctacaccccttatccccatactagttattatcgaaacc

SEQ ID NO: 73059 - DNA, 120 bp, Homo sapiens
  misc_feature: 690 for SV(C|O) and mtDNA
cgttccacagaagctgccatcaagtatttcctcacgcaagcaaccgcatccataatccttctaatagctatcctcttcaacaatatactctccggacaatgaaccataaccaatactacc

SEQ ID NO: 73060 - DNA, 120 bp, Homo sapiens
  misc_feature: 690 for SV(C|O) and mtDNA
ggctcactcacccaccacattaacaacataaaaccctcattcacacgagaaaacaccctcatgttcatacacctatcccccattctcctcctatccctcaaccccgacatcattaccggg

SEQ ID NO: 73061 - DNA, 120 bp, Homo sapiens
  misc_feature: 690 for SV(C|O) and mtDNA
acaatagggtttacgacctcgatgttggatcaggacatcccgatggtgcagccgctattaaaggttcgtttgttcaacgattaaagtcctacgtgatctgagttcagaccggagtaatcc

SEQ ID NO: 73062 - DNA, 120 bp, Homo sapiens
  misc_feature: 690 for SV(C|O) and mtDNA
ccaagaactatcaaactcctgagccaacaacttaatatgactagcttacacaatagcttttatagtaaagatacctctttacggactccacttatgactccctaaagcccatgtcgaagc

SEQ ID NO: 73063 - DNA, 120 bp, Homo sapiens; identical to SEQ ID NO: 57644
  misc_feature: 690 for SV(C|O) and mtDNA

SEQ ID NO: 73064 - DNA, 120 bp, Homo sapiens; identical to SEQ ID NO: 56710
  misc_feature: 690 for SV(C|O) and mtDNA

SEQ ID NO: 73065 - DNA, 120 bp, Homo sapiens
  misc_feature: 690 for SV(C|O) and mtDNA
ccacacccacccaagaacagggtttgttaagatggcagagcccggtaatcgcataaaacttaaaactttacagtcagaggttcaattcctcttcttaacaacatacccatggccaacctc

SEQ ID NO: 73066 - DNA, 120 bp, Homo sapiens; identical to SEQ ID NO: 52841
  misc_feature: 690 for SV(C|O) and mtDNA

SEQ ID NO: 73067 - DNA, 120 bp, Homo sapiens
  misc_feature: 690 for SV(C|O) and mtDNA
ctacaaaccacaaagacattggaacactatacctattattcggcgcatgagctggagtcctaggcacagctctaagcctccttattcgagccgagctgggccagccaggcaaccttctag

SEQ ID NO: 73068 - DNA, 120 bp, Homo sapiens; identical to SEQ ID NO: 57679
  misc_feature: 690 for SV(C|O) and mtDNA

SEQ ID NO: 73069 - DNA, 120 bp, Homo sapiens
  misc_feature: 690 for SV(C|O) and mtDNA
agtaaaattgtaataagcagtgcttgaattatttggtttcggttgttttctattagactatggtgagctcaggtgattgatactcctgatgcgagtaatacggatgtgtttaggagtggg

SEQ ID NO: 73070 - DNA, 120 bp, Homo sapiens
  misc_feature: 690 for SV(C|O) and mtDNA
cagcgatttctaggatagtcagtagaattagaattgtgaagatgataagtgtagagggaaggttaatggttgatattgctagggtggcgcttccaattaggtgcatgagtaggtggcctg

SEQ ID NO: 73071 - DNA, 120 bp, Homo sapiens; identical to SEQ ID NO: 56033
  misc_feature: 690 for SV(C|O) and mtDNA

SEQ ID NO: 73072 - DNA, 120 bp, Homo sapiens; identical to SEQ ID NO: 61691
  misc_feature: 690 for SV(C|O) and mtDNA

SEQ ID NO: 73073 - DNA, 120 bp, Homo sapiens; identical to SEQ ID NO: 56885
  misc_feature: 690 for SV(C|O) and mtDNA

SEQ ID NO: 73074 - DNA, 120 bp, Homo sapiens
  misc_feature: 690 for SV(C|O) and mtDNA
aaaactccagctgacacaaaatagactacgaaagtggctttaacatatctgaacacacaatagctaagacccaaactgggattagataccccactatgcttagccctaaacctcaacagt

SEQ ID NO: 73075 - DNA, 120 bp, Homo sapiens; identical to SEQ ID NO: 52116
  misc_feature: 689 for SV(C|O) and mtDNA

SEQ ID NO: 73076 - DNA, 120 bp, Homo sapiens; identical to SEQ ID NO: 53457
  misc_feature: 689 for SV(C|O) and mtDNA

SEQ ID NO: 73077 - DNA, 120 bp, Homo sapiens; identical to SEQ ID NO: 57857
  misc_feature: 689 for SV(C|O) and mtDNA

SEQ ID NO: 73078 - DNA, 120 bp, Homo sapiens; identical to SEQ ID NO: 53741
  misc_feature: 689 for SV(C|O) and mtDNA

SEQ ID NO: 73079 - DNA, 120 bp, Homo sapiens
  misc_feature: 689 for SV(C|O) and mtDNA
ggcctttgcgtagttgtatatagcctagaatttttcgttcggtaagcattaggaatgccattgcgattagaatgggtacaatgaggagtaggaggttggccatgggtatgttgttaagaa

SEQ ID NO: 73080 - DNA, 120 bp, Homo sapiens; identical to SEQ ID NO: 57433
  misc_feature: 689 for SV(C|O) and mtDNA

SEQ ID NO: 73081 - DNA, 120 bp, Homo sapiens
  misc_feature: 689 for SV(C|O) and mtDNA
gggtatgttgttaagaagaggaattgaacctctgactgtaaagttttaagttttatgcgattaccgggctctgccatcttaacaaaccctgttcttgggtgggtgtgggtataatactaa

SEQ ID NO: 73082 - DNA, 120 bp, Homo sapiens
  misc_feature: 689 for SV(C|O) and mtDNA
ccctcattcacacgagaaaacaccctcatgttcatacacctatcccccattctcctcctatccctcaaccccgacatcattaccgggttttcctcttgtaaatatagtttaaccaaaaca

SEQ ID NO: 73083 - DNA, 120 bp, Homo sapiens
  misc_feature: 689 for SV(C|O) and mtDNA
caatagggtttacgacctcgatgttggatcaggacatcccgatggtgcagccgctattaaaggttcgtttgttcaacgattaaagtcctacgtgatctgagttcagaccggagtaatcca

SEQ ID NO: 73084 - DNA, 120 bp, Homo sapiens
  misc_feature: 689 for SV(C|O) and mtDNA
gtccctaacaaactaggaggcgtccttgccctattactatccatcctcatcctagcaataatccccatcctccatatatccaaacaacaaagcataatatttcgcccactaagccaatca

SEQ ID NO: 73085 - DNA, 120 bp, Homo sapiens
  misc_feature: 689 for SV(C|O) and mtDNA
aattacccccatactccttacactattcctcatcacccaactaaaaatattaaacacaaactaccacctacctccctcaccaaagcccataaaaataaaaaattataacaaaccctgaga

SEQ ID NO: 73086 - DNA, 120 bp, Homo sapiens
  misc_feature: 689 for SV(C|O) and mtDNA
agtattagttagttttgttgtgagtgttaggaaaagggcatacaggactaggaagcagataaggaaaatgattatgagggcgtgatcatgaaaggtgataagctcttctatgatagggga

SEQ ID NO: 73087 - DNA, 120 bp, Homo sapiens; identical to SEQ ID NO: 57689
  misc_feature: 689 for SV(C|O) and mtDNA

SEQ ID NO: 73088 - DNA, 120 bp, Homo sapiens; identical to SEQ ID NO: 53230
  misc_feature: 689 for SV(C|O) and mtDNA

SEQ ID NO: 73089 - DNA, 120 bp, Homo sapiens
  misc_feature: 689 for SV(C|O) and mtDNA
tattatgtcctacaagcattaattaattaacacactttagtaagtatgttcgtctgtaatattgaacgtaggtgcgataaataataggatgaggcaggaatcaaagacagatactgcgac

SEQ ID NO: 73090 - DNA, 120 bp, Homo sapiens
  misc_feature: 689 for SV(C|O) and mtDNA
tatgagaatcgaacccatccctgagaatccaaaattctccgtgccacctatcacaccccatcctaaagtaaggtcagctaaataagctatcgggcccataccccgaaaatgttggttata

SEQ ID NO: 73091 - DNA, 120 bp, Homo sapiens
  misc_feature: 689 for SV(C|O) and mtDNA
actccggtctgaactcagatcacgtaggactttaatcgttgaacaaacgaacctttaatagcggctgcaccatcgggatgtcctgatccaacatcgaggtcgtaaaccctattgttgata

SEQ ID NO: 73092 - DNA, 120 bp, Homo sapiens; identical to SEQ ID NO: 52153
  misc_feature: 689 for SV(C|O) and mtDNA

SEQ ID NO: 73093 - DNA, 120 bp, Homo sapiens
  misc_feature: 689 for SV(C|O) and mtDNA
aaatccccactatgcacattttatttctccaacatactcggattctaccctaccatcacacaccgcacaatcccctatctaggccttcttacgagccaaaacctgcccctactcctccta

SEQ ID NO: 73094 - DNA, 120 bp, Homo sapiens
  misc_feature: 689 for SV(C|O) and mtDNA
tagccattatgattattaatgatgagtattgattggtagtattggttatggttcattgtccggagagtatattgttgaagaggatagctattagaaggattatggatgcggttgcttgcg

SEQ ID NO: 73095 - DNA, 120 bp, Homo sapiens
  misc_feature: 689 for SV(C|O) and mtDNA
tagcacattacagtcaaatcccttctcgtccccatggatgacccccctcagataggggtcccttgaccaccatcctccgtgaaatcaatatcccgcacaagagtgctactctcctcgctc

SEQ ID NO: 73096 - DNA, 120 bp, Homo sapiens
  misc_feature: 689 for SV(C|O) and mtDNA
ctagactacttctccataatattcatccctgtagcattattcgttacatggtccatcatagaattctcactgtgatatataaactcagacccaaacattaatcagttcttcaaatatcta

SEQ ID NO: 73097 - DNA, 120 bp, Homo sapiens; identical to SEQ ID NO: 54475
  misc_feature: 689 for SV(C|O) and mtDNA

SEQ ID NO: 73098 - DNA, 120 bp, Homo sapiens
  misc_feature: 689 for SV(C|O) and mtDNA
agccgcactcgtaaggggtggatttttctatgtagccgttgagttgtggtagtcaaaatgtaataattattagtagtaaggctaggagggtgttgattattaaaattaaggcgaagttta

SEQ ID NO: 73099 - DNA, 120 bp, Homo sapiens
  misc_feature: 689 for SV(C|O) and mtDNA
gttggagattgagactagtagggctaggcccaccgctgcttcgcaggcggcaaagactagtatggcaataggcacaatattggctaagagggagtgggtgttgagggttatgagagtagc

SEQ ID NO: 73100 - DNA, 120 bp, Homo sapiens
  misc_feature: 689 for SV(C|O) and mtDNA
gttagtattagttagttttgttgtgagtgttaggaaaagggcatacaggactaggaagcagataaggaaaatgattatgagggcgtgatcatgaaaggtgataagctcttctatgatagg

SEQ ID NO: 73101 - DNA, 120 bp, Homo sapiens; identical to SEQ ID NO: 56912
  misc_feature: 689 for SV(C|O) and mtDNA

SEQ ID NO: 73102 - DNA, 120 bp, Homo sapiens
  misc_feature: 689 for SV(C|O) and mtDNA
attaggaatgccattgcgattagaatgggtacaatgaggagtaggaggttggccatgggtatgttgttaagaagaggaattgaacctctgactgtaaagttttaagttttatgcgattac

SEQ ID NO: 73103 - DNA, 120 bp, Homo sapiens
  misc_feature: 689 for SV(C|O) and mtDNA
gggtatgggcccgatagcttatttagctgaccttactttaggatggggtgtgataggtggcacggagaattttggattctcagggatgggttcgattctcatagtcctagaaataagggg

SEQ ID NO: 73104 - DNA, 120 bp, Homo sapiens
  misc_feature: 689 for SV(C|O) and mtDNA
ggccatccccttatgagcgggcgcagtgattataggctttcgctctaagattaaaaatgccctagcccacttcttaccacaaggcacacctacaccccttatccccatactagttattat

SEQ ID NO: 73105 - DNA, 120 bp, Homo sapiens; identical to SEQ ID NO: 55870
  misc_feature: 689 for SV(C|O) and mtDNA

SEQ ID NO: 73106 - DNA, 120 bp, Homo sapiens; identical to SEQ ID NO: 52094
  misc_feature: 689 for SV(C|O) and mtDNA

SEQ ID NO: 73107 - DNA, 120 bp, Homo sapiens
  misc_feature: 689 for SV(C|O) and mtDNA
attaaccttttaagttaaagattaagagaaccaacacctctttacagtgaaatgccccaactaaatactaccgtatggcccaccataattacccccatactccttacactattcctcatc

SEQ ID NO: 73108 - DNA, 120 bp, Homo sapiens; identical to SEQ ID NO: 56086
  misc_feature: 689 for SV(C|O) and mtDNA

SEQ ID NO: 73109 - DNA, 120 bp, Homo sapiens; identical to SEQ ID NO: 58466
  misc_feature: 689 for SV(C|O) and mtDNA

SEQ ID NO: 73110 - DNA, 120 bp, Homo sapiens
  misc_feature: 689 for SV(C|O) and mtDNA
ctttttggacaggtggtgtgtggtggccttggtatgtgctttctcgtgttacatcgcgccatcattggtatatggttagtgtgttggttagtaggcctagtatgaggagcgttatggagt

SEQ ID NO: 73111 - DNA, 120 bp, Homo sapiens
  misc_feature: 689 for SV(C|O) and mtDNA
ctccataaacctggagtgactatatggatgccccccaccctaccacacattcgaagaacccgtatacataaaatctagacaaaaaaggaaggaatcgaaccccccaaagctggtttcaag

SEQ ID NO: 73112 - DNA, 120 bp, Homo sapiens; identical to SEQ ID NO: 55494
  misc_feature: 689 for SV(C|O) and mtDNA

SEQ ID NO: 73113 - DNA, 120 bp, Homo sapiens
  misc_feature: 689 for SV(C|O) and mtDNA
agcttatgttgtttatgcggggaaacgccatatcgggggcaccgattattaggggaactagtcagttgccaaagcctccgattatgatgggtattactatgaagaagattattacaaatg

SEQ ID NO: 73114 - DNA, 120 bp, Homo sapiens; identical to SEQ ID NO: 61829
  misc_feature: 689 for SV(C|O) and mtDNA

SEQ ID NO: 73115 - DNA, 120 bp, Homo sapiens
  misc_feature: 689 for SV(C|O) and mtDNA
atgctggagattgtaatgggtatggagacatatcatataagtaatgctagggtgagtggtaggaagttttttcataggaggtgtatgagttggtcgtagcggaatcgggggtatgctgtt

SEQ ID NO: 73116 - DNA, 120 bp, Homo sapiens
  misc_feature: 689 for SV(C|O) and mtDNA
atccaccttcgacccttaagtttcataagggctatcgtagttttctggggtagaaaatgtagcccatttcttgccacctcatgggctacaccttgacctaacgtctttacgtgggtactt

SEQ ID NO: 73117 - DNA, 120 bp, Homo sapiens
  misc_feature: 689 for SV(C|O) and mtDNA
accacccaactatctataaacctagccatggccatccccttatgagcgggcgcagtgattataggctttcgctctaagattaaaaatgccctagcccacttcttaccacaaggcacacct

SEQ ID NO: 73118 - DNA, 120 bp, Homo sapiens
  misc_feature: 689 for SV(C|O) and mtDNA
acagcgatttctaggatagtcagtagaattagaattgtgaagatgataagtgtagagggaaggttaatggttgatattgctagggtggcgcttccaattaggtgcatgagtaggtggcct

SEQ ID NO: 73119 - DNA, 120 bp, Homo sapiens
  misc_feature: 689 for SV(C|O) and mtDNA
acacgagaaaacaccctcatgttcatacacctatcccccattctcctcctatccctcaaccccgacatcattaccgggttttcctcttgtaaatatagtttaaccaaaacatcagattgt

SEQ ID NO: 73120 - DNA, 120 bp, Homo sapiens
  misc_feature: 688 for SV(C|O) and mtDNA
tttgtatgattatgggcgttgattagtagtagttactggttgaacattgtttgttggtgtatatattgtaattgagattgctcgggggaataggttatgtgattaggagtagggttagga

SEQ ID NO: 73121 - DNA, 120 bp, Homo sapiens
  misc_feature: 688 for SV(C|O) and mtDNA
ccccattatgtaaaatccattgtcgcatccacctttattatcagtctcttccccacaacaatattcatgtgcctagaccaagaagttattatctcgaactgacactgagccacaacccaa

SEQ ID NO: 73122 - DNA, 120 bp, Homo sapiens
  misc_feature: 688 for SV(C|O) and mtDNA
ttcttcttagtagctattaccttcttattatttgatctagaaattgccctccttttacccctaccatgagccctacaaacaactaacctaccactaatagttatgtcatccctcttatta

SEQ ID NO: 73123 - DNA, 120 bp, Homo sapiens
  misc_feature: 688 for SV(C|O) and mtDNA
ttctccaacatactcggattctaccctaccatcacacaccgcacaatcccctatctaggccttcttacgagccaaaacctgcccctactcctcctagacctaacctgactagaaaagcta

SEQ ID NO: 73124 - DNA, 120 bp, Homo sapiens
  misc_feature: 688 for SV(C|O) and mtDNA
ttcgtgatagtggttcactggataagtggcgttggcttgccatgattgtgaggggtaggagtcaggtagttagtattaggaggggggttgttagggggtcggaggaaaaggttggggaac

SEQ ID NO: 73125 - DNA, 120 bp, Homo sapiens; identical to SEQ ID NO: 53173
  misc_feature: 688 for SV(C|O) and mtDNA

SEQ ID NO: 73126 - DNA, 120 bp, Homo sapiens; identical to SEQ ID NO: 58201
  misc_feature: 688 for SV(C|O) and mtDNA

SEQ ID NO: 73127 - DNA, 120 bp, Homo sapiens
  misc_feature: 688 for SV(C|O) and mtDNA
aaaccacgtctacaaaatgccagtatcaggcggcggcttcgaagccaaagtgatgtttggatgtaaagtgaaatattagttggcggatgaagcagatagtgaggaaagttgagccaataa

SEQ ID NO: 73128 - DNA, 120 bp, Homo sapiens
  misc_feature: 688 for SV(C|O) and mtDNA
ttatacccacacccacccaagaacagggtttgttaagatggcagagcccggtaatcgcataaaacttaaaactttacagtcagaggttcaattcctcttcttaacaacatacccatggcc

SEQ ID NO: 73129 - DNA, 120 bp, Homo sapiens; identical to SEQ ID NO: 58161
  misc_feature: 688 for SV(C|O) and mtDNA

SEQ ID NO: 73130 - DNA, 120 bp, Homo sapiens
  misc_feature: 688 for SV(C|O) and mtDNA
tgttaagaagaggaattgaacctctgactgtaaagttttaagttttatgcgattaccgggctctgccatcttaacaaaccctgttcttgggtgggtgtgggtataatactaagttgagat

SEQ ID NO: 73131 - DNA, 120 bp, Homo sapiens; identical to SEQ ID NO: 53623
  misc_feature: 688 for SV(C|O) and mtDNA

SEQ ID NO: 73132 - DNA, 120 bp, Homo sapiens
  misc_feature: 688 for SV(C|O) and mtDNA
tgtatgcatcggggtagtccgagtaacgtcggggcattccggataggccgagaaagtgttgtgggaagaaagttagatttacgccgatgaatatgatagtgaaatggattttggcgtagg

SEQ ID NO: 73133 - DNA, 120 bp, Homo sapiens
  misc_feature: 688 for SV(C|O) and mtDNA
tatgagcgggcgcagtgattataggctttcgctctaagattaaaaatgccctagcccacttcttaccacaaggcacacctacaccccttatccccatactagttattatcgaaaccatca

SEQ ID NO: 73134 - DNA, 120 bp, Homo sapiens; identical to SEQ ID NO: 61433
  misc_feature: 688 for SV(C|O) and mtDNA

SEQ ID NO: 73135 - DNA, 120 bp, Homo sapiens
  misc_feature: 688 for SV(C|O) and mtDNA
ggatgtaagtccgtgggcgattatgagaatgactgcgccggtgaagcttcagggggtttggatgagaatggctgttactacgagggctatgtggctgattgaagagtatgcaatgagcga

SEQ ID NO: 73136 - DNA, 120 bp, Homo sapiens; identical to SEQ ID NO: 55534
  misc_feature: 688 for SV(C|O) and mtDNA

SEQ ID NO: 73137 - DNA, 120 bp, Homo sapiens
  misc_feature: 688 for SV(C|O) and mtDNA
tcactgcccaagaactatcaaactcctgagccaacaacttaatatgactagcttacacaatagcttttatagtaaagatacctctttacggactccacttatgactccctaaagcccatg

SEQ ID NO: 73138 - DNA, 120 bp, Homo sapiens; identical to SEQ ID NO: 60321
  misc_feature: 688 for SV(C|O) and mtDNA

SEQ ID NO: 73139 - DNA, 120 bp, Homo sapiens
  misc_feature: 688 for SV(C|O) and mtDNA
gcatactcttcaatcagccacatagccctcgtagtaacagccattctcatccaaaccccctgaagcttcaccggcgcagtcattctcataatcgcccacggacttacatcctcattacta

SEQ ID NO: 73140 - DNA, 120 bp, Homo sapiens
  misc_feature: 688 for SV(C|O) and mtDNA
aactcatcactagacatcgtactacacgacacgtactacgttgtagctcacttccactatgtcctatcaataggagctgtatttgccatcataggaggcttcattcactgatttccccta

SEQ ID NO: 73141 - DNA, 120 bp, Homo sapiens
  misc_feature: 688 for SV(C|O) and mtDNA
taggaatgccattgcgattagaatgggtacaatgaggagtaggaggttggccatgggtatgttgttaagaagaggaattgaacctctgactgtaaagttttaagttttatgcgattaccg

SEQ ID NO: 73142 - DNA, 120 bp, Homo sapiens; identical to SEQ ID NO: 55467
  misc_feature: 688 for SV(C|O) and mtDNA

SEQ ID NO: 73143 - DNA, 120 bp, Homo sapiens
  misc_feature: 688 for SV(C|O) and mtDNA
taaaacactcaccaagacctcaacccctgacccccatgcctcaggatactcctcaatagccatcgctgtagtatatccaaagacaaccatcattccccctaaataaattaaaaaaactat

SEQ ID NO: 73144 - DNA, 120 bp, Homo sapiens
  misc_feature: 688 for SV(C|O) and mtDNA
cctagcccctaccccccaattaggagggcactggcccccaacaggcatcaccccgctaaatcccctagaagtcccactcctaaacacatccgtattactcgcatcaggagtatcaatcac

SEQ ID NO: 73145 - DNA, 120 bp, Homo sapiens
  misc_feature: 688 for SV(C|O) and mtDNA
caaactcatcactagacatcgtactacacgacacgtactacgttgtagctcacttccactatgtcctatcaataggagctgtatttgccatcataggaggcttcattcactgatttcccc

SEQ ID NO: 73146 - DNA, 120 bp, Homo sapiens; identical to SEQ ID NO: 60361
  misc_feature: 688 for SV(C|O) and mtDNA

SEQ ID NO: 73147 - DNA, 120 bp, Homo sapiens; identical to SEQ ID NO: 56582
  misc_feature: 688 for SV(C|O) and mtDNA

SEQ ID NO: 73148 - DNA, 120 bp, Homo sapiens; identical to SEQ ID NO: 55327
  misc_feature: 688 for SV(C|O) and mtDNA

SEQ ID NO: 73149 - DNA, 120 bp, Homo sapiens
  misc_feature: 688 for SV(C|O) and mtDNA
gcattaggaatgccattgcgattagaatgggtacaatgaggagtaggaggttggccatgggtatgttgttaagaagaggaattgaacctctgactgtaaagttttaagttttatgcgatt

SEQ ID NO: 73150 - DNA, 120 bp, Homo sapiens
  misc_feature: 688 for SV(C|O) and mtDNA
gcacattacagtcaaatcccttctcgtccccatggatgacccccctcagataggggtcccttgaccaccatcctccgtgaaatcaatatcccgcacaagagtgctactctcctcgctccg

SEQ ID NO: 73151 - DNA, 120 bp, Homo sapiens
  misc_feature: 688 for SV(C|O) and mtDNA
atgtactacaggtggtcaagtatttatggtaccgtacaatattcatggtggctggcagtaatgtacgaattacatagcggttgttgatgggtgagtcaatacttgggtggcacccaaatc

SEQ ID NO: 73152 - DNA, 120 bp, Homo sapiens
  misc_feature: 688 for SV(C|O) and mtDNA
acctcaatcacactactccccatatctaacaacgtaaaaataaaatgacagtttgaacatacaaaacccaccccattcctccccacactcatcgcccttaccacgctactcctacctatc

SEQ ID NO: 73153 - DNA, 120 bp, Homo sapiens
  misc_feature: 688 for SV(C|O) and mtDNA
gagggggaatgctggagattgtaatgggtatggagacatatcatataagtaatgctagggtgagtggtaggaagttttttcataggaggtgtatgagttggtcgtagcggaatcgggggt

SEQ ID NO: 73154 - DNA, 120 bp, Homo sapiens; identical to SEQ ID NO: 58299
  misc_feature: 688 for SV(C|O) and mtDNA

SEQ ID NO: 73155 - DNA, 120 bp, Homo sapiens
  misc_feature: 688 for SV(C|O) and mtDNA
aacaatcctaatcctaataccaactatctccctaattgaaaacaaaatactcaaatgggcctgtccttgtagtataaactaatacaccagtcttgtaaaccggagatgaaaacctttttc

SEQ ID NO: 73156 - DNA, 120 bp, Homo sapiens
  misc_feature: 688 for SV(C|O) and mtDNA
aggaatgccattgcgattagaatgggtacaatgaggagtaggaggttggccatgggtatgttgttaagaagaggaattgaacctctgactgtaaagttttaagttttatgcgattaccgg

SEQ ID NO: 73157 - DNA, 120 bp, Homo sapiens
  misc_feature: 688 for SV(C|O) and mtDNA
aaatgatccgtaatataggcctcgcccgatgtgtaggaagaggcagataaagaatattgaggcgccattggcgtgaaggtagcggatgattcagccataatttacgtctcgagtgatgtg

SEQ ID NO: 73158 - DNA, 120 bp, Homo sapiens
  misc_feature: 688 for SV(C|O) and mtDNA
aaattcctccctgtacgaaaggacaagagaaataaggcctacttcacaaagcgccttcccccgtaaatgatatcatctcaacttagtattatacccacacccacccaagaacagggtttg

SEQ ID NO: 73159 - DNA, 120 bp, Homo sapiens; identical to SEQ ID NO: 58575
  misc_feature: 688 for SV(C|O) and mtDNA

SEQ ID NO: 73160 - DNA, 120 bp, Homo sapiens
  misc_feature: 688 for SV(C|O) and mtDNA
agtattatacccacacccacccaagaacagggtttgttaagatggcagagcccggtaatcgcataaaacttaaaactttacagtcagaggttcaattcctcttcttaacaacatacccat

SEQ ID NO: 73161 - DNA, 120 bp, Homo sapiens
  misc_feature: 688 for SV(C|O) and mtDNA
agcattaggaatgccattgcgattagaatgggtacaatgaggagtaggaggttggccatgggtatgttgttaagaagaggaattgaacctctgactgtaaagttttaagttttatgcgat

SEQ ID NO: 73162 - DNA, 120 bp, Homo sapiens
  misc_feature: 688 for SV(C|O) and mtDNA
aatccaccttcgacccttaagtttcataagggctatcgtagttttctggggtagaaaatgtagcccatttcttgccacctcatgggctacaccttgacctaacgtctttacgtgggtact

SEQ ID NO: 73163 - DNA, 120 bp, Homo sapiens
  misc_feature: 687 for SV(C|O) and mtDNA
ccaaaaattttggtgcaactccaaataaaagtaacaaccatgcacactactataaccaccctaaccctgacttccctaattccccccatccttaccaccctcgttaaccctaacaaaaaa

SEQ ID NO: 73164 - DNA, 120 bp, Homo sapiens; identical to SEQ ID NO: 56962
  misc_feature: 687 for SV(C|O) and mtDNA

SEQ ID NO: 73165 - DNA, 120 bp, Homo sapiens; identical to SEQ ID NO: 57191
  misc_feature: 687 for SV(C|O) and mtDNA

SEQ ID NO: 73166 - DNA, 120 bp, Homo sapiens
  misc_feature: 687 for SV(C|O) and mtDNA
gcccaccataattacccccatactccttacactattcctcatcacccaactaaaaatattaaacacaaactaccacctacctccctcaccaaagcccataaaaataaaaaattataacaa

SEQ ID NO: 73167 - DNA, 120 bp, Homo sapiens
  misc_feature: 687 for SV(C|O) and mtDNA
agctactctcataaccctcaacacccactccctcttagccaatattgtgcctattgccatactagtctttgccgcctgcgaagcagcggtgggcctagccctactagtctcaatctccaa

SEQ ID NO: 73168 - DNA, 120 bp, Homo sapiens
  misc_feature: 687 for SV(C|O) and mtDNA
ccagcctagcccctaccccccaattaggagggcactggcccccaacaggcatcaccccgctaaatcccctagaagtcccactcctaaacacatccgtattactcgcatcaggagtatcaa

SEQ ID NO: 73169 - DNA, 120 bp, Homo sapiens; identical to SEQ ID NO: 61559
  misc_feature: 687 for SV(C|O) and mtDNA

SEQ ID NO: 73170 - DNA, 120 bp, Homo sapiens
  misc_feature: 687 for SV(C|O) and mtDNA
ttaagaagaggaattgaacctctgactgtaaagttttaagttttatgcgattaccgggctctgccatcttaacaaaccctgttcttgggtgggtgtgggtataatactaagttgagatga

SEQ ID NO: 73171 - DNA, 120 bp, Homo sapiens
  misc_feature: 687 for SV(C|O) and mtDNA
tcttaaaactaggcggctatggtataatacgcctcacactcattctcaaccccctgacaaaacacatagcctaccccttccttgtactatccctatgaggcataattataacaagctcca

SEQ ID NO: 73172 - DNA, 120 bp, Homo sapiens
  misc_feature: 687 for SV(C|O) and mtDNA
tgagcgattttaggtctgtttgtcgtaggcagatggagcttgttataattatgcctcatagggatagtacaaggaaggggtaggctatgtgttttgtcagggggttgagaatgagtgtga

SEQ ID NO: 73173 - DNA, 120 bp, Homo sapiens
  misc_feature: 687 for SV(C|O) and mtDNA
cctttgcgtagttgtatatagcctagaatttttcgttcggtaagcattaggaatgccattgcgattagaatgggtacaatgaggagtaggaggttggccatgggtatgttgttaagaaga

SEQ ID NO: 73174 - DNA, 120 bp, Homo sapiens
  misc_feature: 687 for SV(C|O) and mtDNA
gactacaaccacgaccaatgatatgaaaaaccatcgttgtatttcaactacaagaacaccaatgaccccaatacgcaaaattaaccccctaataaaattaattaaccactcattcatcga

SEQ ID NO: 73175 - DNA, 120 bp, Homo sapiens
  misc_feature: 687 for SV(C|O) and mtDNA
catccccttatgagcgggcgcagtgattataggctttcgctctaagattaaaaatgccctagcccacttcttaccacaaggcacacctacaccccttatccccatactagttattatcga

SEQ ID NO: 73176 - DNA, 120 bp, Homo sapiens
  misc_feature: 687 for SV(C|O) and mtDNA
tatgtactacaggtggtcaagtatttatggtaccgtacaatattcatggtggctggcagtaatgtacgaattacatagcggttgttgatgggtgagtcaatacttgggtggcacccaaat

SEQ ID NO: 73177 - DNA, 120 bp, Homo sapiens; identical to SEQ ID NO: 55572
  misc_feature: 687 for SV(C|O) and mtDNA

SEQ ID NO: 73178 - DNA, 120 bp, Homo sapiens; identical to SEQ ID NO: 61222
  misc_feature: 687 for SV(C|O) and mtDNA

SEQ ID NO: 73179 - DNA, 120 bp, Homo sapiens; identical to SEQ ID NO: 57933
  misc_feature: 687 for SV(C|O) and mtDNA

SEQ ID NO: 73180 - DNA, 120 bp, Homo sapiens
  misc_feature: 687 for SV(C|O) and mtDNA
taattacccccatactccttacactattcctcatcacccaactaaaaatattaaacacaaactaccacctacctccctcaccaaagcccataaaaataaaaaattataacaaaccctgag

SEQ ID NO: 73181 - DNA, 120 bp, Homo sapiens
  misc_feature: 687 for SV(C|O) and mtDNA
aaattcttcttagtagctattaccttcttattatttgatctagaaattgccctccttttacccctaccatgagccctacaaacaactaacctaccactaatagttatgtcatccctctta

SEQ ID NO: 73182 - DNA, 120 bp, Homo sapiens
  misc_feature: 687 for SV(C|O) and mtDNA
actatgagaatcgaacccatccctgagaatccaaaattctccgtgccacctatcacaccccatcctaaagtaaggtcagctaaataagctatcgggcccataccccgaaaatgttggtta

SEQ ID NO: 73183 - DNA, 120 bp, Homo sapiens; identical to SEQ ID NO: 53549
  misc_feature: 687 for SV(C|O) and mtDNA

SEQ ID NO: 73184 - DNA, 120 bp, Homo sapiens
  misc_feature: 687 for SV(C|O) and mtDNA
accctcattcacacgagaaaacaccctcatgttcatacacctatcccccattctcctcctatccctcaaccccgacatcattaccgggttttcctcttgtaaatatagtttaaccaaaac

SEQ ID NO: 73185 - DNA, 120 bp, Homo sapiens
  misc_feature: 687 for SV(C|O) and mtDNA
gtatgttgttaagaagaggaattgaacctctgactgtaaagttttaagttttatgcgattaccgggctctgccatcttaacaaaccctgttcttgggtgggtgtgggtataatactaagt

SEQ ID NO: 73186 - DNA, 120 bp, Homo sapiens
  misc_feature: 687 for SV(C|O) and mtDNA
aaatccaccttcgacccttaagtttcataagggctatcgtagttttctggggtagaaaatgtagcccatttcttgccacctcatgggctacaccttgacctaacgtctttacgtgggtac

SEQ ID NO: 73187 - DNA, 120 bp, Homo sapiens; identical to SEQ ID NO: 54152
  misc_feature: 687 for SV(C|O) and mtDNA

SEQ ID NO: 73188 - DNA, 120 bp, Homo sapiens
  misc_feature: 687 for SV(C|O) and mtDNA
gggctttagggagtcataagtggagtccgtaaagaggtatctttactataaaagctattgtgtaagctagtcatattaagttgttggctcaggagtttgatagttcttgggcagtgagag

SEQ ID NO: 73189 - DNA, 120 bp, Homo sapiens
  misc_feature: 687 for SV(C|O) and mtDNA
ggctagtttttgtcatgtgagaagaagcaggccggatgtcagaggggtgccttgggtaacctctgggacccagaagtgaaagggggctattcctagttttattgctatagccattatgat

SEQ ID NO: 73190 - DNA, 120 bp, Homo sapiens; identical to SEQ ID NO: 58506
  misc_feature: 687 for SV(C|O) and mtDNA

SEQ ID NO: 73191 - DNA, 120 bp, Homo sapiens
  misc_feature: 687 for SV(C|O) and mtDNA
agcctagcccctaccccccaattaggagggcactggcccccaacaggcatcaccccgctaaatcccctagaagtcccactcctaaacacatccgtattactcgcatcaggagtatcaatc

SEQ ID NO: 73192 - DNA, 120 bp, Homo sapiens; identical to SEQ ID NO: 56087
  misc_feature: 687 for SV(C|O) and mtDNA

SEQ ID NO: 73193 - DNA, 120 bp, Homo sapiens
  misc_feature: 687 for SV(C|O) and mtDNA
cttgccgcagtactcttaaaactaggcggctatggtataatacgcctcacactcattctcaaccccctgacaaaacacatagcctaccccttccttgtactatccctatgaggcataatt

SEQ ID NO: 73194 - DNA, 120 bp, Homo sapiens; identical to SEQ ID NO: 58155
  misc_feature: 687 for SV(C|O) and mtDNA

SEQ ID NO: 73195 - DNA, 120 bp, Homo sapiens
  misc_feature: 687 for SV(C|O) and mtDNA
ctctacaaaccacaaagacattggaacactatacctattattcggcgcatgagctggagtcctaggcacagctctaagcctccttattcgagccgagctgggccagccaggcaaccttct

SEQ ID NO: 73196 - DNA, 120 bp, Homo sapiens; identical to SEQ ID NO: 55396
  misc_feature: 687 for SV(C|O) and mtDNA

SEQ ID NO: 73197 - DNA, 120 bp, Homo sapiens; identical to SEQ ID NO: 55204
  misc_feature: 687 for SV(C|O) and mtDNA

SEQ ID NO: 73198 - DNA, 120 bp, Homo sapiens
  misc_feature: 687 for SV(C|O) and mtDNA
ctaaatccaccttcgacccttaagtttcataagggctatcgtagttttctggggtagaaaatgtagcccatttcttgccacctcatgggctacaccttgacctaacgtctttacgtgggt

SEQ ID NO: 73199 - DNA, 120 bp, Homo sapiens
  misc_feature: 687 for SV(C|O) and mtDNA
cggggtatgggcccgatagcttatttagctgaccttactttaggatggggtgtgataggtggcacggagaattttggattctcagggatgggttcgattctcatagtcctagaaataagg

SEQ ID NO: 73200 - DNA, 120 bp, Homo sapiens
  misc_feature: 687 for SV(C|O) and mtDNA
aggatgtaagtccgtgggcgattatgagaatgactgcgccggtgaagcttcagggggtttggatgagaatggctgttactacgagggctatgtggctgattgaagagtatgcaatgagcg

SEQ ID NO: 73201 - DNA, 120 bp, Homo sapiens; identical to SEQ ID NO: 55452
  misc_feature: 687 for SV(C|O) and mtDNA

SEQ ID NO: 73202 - DNA, 120 bp, Homo sapiens; identical to SEQ ID NO: 58326
  misc_feature: 687 for SV(C|O) and mtDNA

SEQ ID NO: 73203 - DNA, 120 bp, Homo sapiens; identical to SEQ ID NO: 57954
  misc_feature: 687 for SV(C|O) and mtDNA

SEQ ID NO: 73204 - DNA, 120 bp, Homo sapiens
  misc_feature: 687 for SV(C|O) and mtDNA
cactccctcttagccaatattgtgcctattgccatactagtctttgccgcctgcgaagcagcggtgggcctagccctactagtctcaatctccaacacatatggcctagactacgtacat

SEQ ID NO: 73205 - DNA, 120 bp, Homo sapiens; identical to SEQ ID NO: 59270
  misc_feature: 687 for SV(C|O) and mtDNA

SEQ ID NO: 73206 - DNA, 120 bp, Homo sapiens
  misc_feature: 687 for SV(C|O) and mtDNA
caacaatagggtttacgacctcgatgttggatcaggacatcccgatggtgcagccgctattaaaggttcgtttgttcaacgattaaagtcctacgtgatctgagttcagaccggagtaat

SEQ ID NO: 73207 - DNA, 120 bp, Homo sapiens; identical to SEQ ID NO: 55586
  misc_feature: 687 for SV(C|O) and mtDNA

SEQ ID NO: 73208 - DNA, 120 bp, Homo sapiens; identical to SEQ ID NO: 57066
  misc_feature: 686 for SV(C|O) and mtDNA

SEQ ID NO: 73209 - DNA, 120 bp, Homo sapiens; identical to SEQ ID NO: 57128
  misc_feature: 686 for SV(C|O) and mtDNA

SEQ ID NO: 73210 - DNA, 120 bp, Homo sapiens
  misc_feature: 686 for SV(C|O) and mtDNA
cccaccataattacccccatactccttacactattcctcatcacccaactaaaaatattaaacacaaactaccacctacctccctcaccaaagcccataaaaataaaaaattataacaaa

SEQ ID NO: 73211 - DNA, 120 bp, Homo sapiens; identical to SEQ ID NO: 62279
  misc_feature: 686 for SV(C|O) and mtDNA

SEQ ID NO: 73212 - DNA, 120 bp, Homo sapiens
  misc_feature: 686 for SV(C|O) and mtDNA
tttaccgtacatagcacattacagtcaaatcccttctcgtccccatggatgacccccctcagataggggtcccttgaccaccatcctccgtgaaatcaatatcccgcacaagagtgctac

SEQ ID NO: 73213 - DNA, 120 bp, Homo sapiens; identical to SEQ ID NO: 56655
  misc_feature: 686 for SV(C|O) and mtDNA

SEQ ID NO: 73214 - DNA, 120 bp, Homo sapiens; identical to SEQ ID NO: 61294
  misc_feature: 686 for SV(C|O) and mtDNA

SEQ ID NO: 73215 - DNA, 120 bp, Homo sapiens; identical to SEQ ID NO: 61522
  misc_feature: 686 for SV(C|O) and mtDNA

SEQ ID NO: 73216 - DNA, 120 bp, Homo sapiens; identical to SEQ ID NO: 52991
  misc_feature: 686 for SV(C|O) and mtDNA

SEQ ID NO: 73217 - DNA, 120 bp, Homo sapiens
  misc_feature: 686 for SV(C|O) and mtDNA
ccagcccatgacccctaacaggggccctctcagccctcctaatgacctccggcctagccatgtgatttcacttccactccataacgctcctcatactaggcctactaaccaacacactaa

SEQ ID NO: 73218 - DNA, 120 bp, Homo sapiens
  misc_feature: 686 for SV(C|O) and mtDNA
ttaggaatgccattgcgattagaatgggtacaatgaggagtaggaggttggccatgggtatgttgttaagaagaggaattgaacctctgactgtaaagttttaagttttatgcgattacc

SEQ ID NO: 73219 - DNA, 120 bp, Homo sapiens
  misc_feature: 686 for SV(C|O) and mtDNA
ttagcagttcttgtgagctttctcggtaaataaggggtcgtaagcctctgttgtcagattcacaatctgatgttttggttaaactatatttacaagaggaaaacccggtaatgatgtcgg

SEQ ID NO: 73220 - DNA, 120 bp, Homo sapiens
  misc_feature: 686 for SV(C|O) and mtDNA
gggcatgagttagcagttcttgtgagctttctcggtaaataaggggtcgtaagcctctgttgtcagattcacaatctgatgttttggttaaactatatttacaagaggaaaacccggtaa

SEQ ID NO: 73221 - DNA, 120 bp, Homo sapiens
  misc_feature: 686 for SV(C|O) and mtDNA
actccagctgacacaaaatagactacgaaagtggctttaacatatctgaacacacaatagctaagacccaaactgggattagataccccactatgcttagccctaaacctcaacagttaa

SEQ ID NO: 73222 - DNA, 120 bp, Homo sapiens; identical to SEQ ID NO: 54836
  misc_feature: 686 for SV(C|O) and mtDNA

SEQ ID NO: 73223 - DNA, 120 bp, Homo sapiens
  misc_feature: 686 for SV(C|O) and mtDNA
tgggcctagccctactagtctcaatctccaacacatatggcctagactacgtacataacctaaacctactccaatgctaaaactaatcgtcccaacaattatattactaccactgacatg

SEQ ID NO: 73224 - DNA, 120 bp, Homo sapiens
  misc_feature: 686 for SV(C|O) and mtDNA
tgggcccgatagcttatttagctgaccttactttaggatggggtgtgataggtggcacggagaattttggattctcagggatgggttcgattctcatagtcctagaaataagggggttta

SEQ ID NO: 73225 - DNA, 120 bp, Homo sapiens
  misc_feature: 686 for SV(C|O) and mtDNA
attttggtgcaactccaaataaaagtaacaaccatgcacactactataaccaccctaaccctgacttccctaattccccccatccttaccaccctcgttaaccctaacaaaaaaaactca

SEQ ID NO: 73226 - DNA, 120 bp, Homo sapiens; identical to SEQ ID NO: 58078
  misc_feature: 686 for SV(C|O) and mtDNA

SEQ ID NO: 73227 - DNA, 120 bp, Homo sapiens; identical to SEQ ID NO: 61203
  misc_feature: 686 for SV(C|O) and mtDNA

SEQ ID NO: 73228 - DNA, 120 bp, Homo sapiens
  misc_feature: 686 for SV(C|O) and mtDNA
aagcattaggaatgccattgcgattagaatgggtacaatgaggagtaggaggttggccatgggtatgttgttaagaagaggaattgaacctctgactgtaaagttttaagttttatgcga

SEQ ID NO: 73229 - DNA, 120 bp, Homo sapiens
  misc_feature: 686 for SV(C|O) and mtDNA
tccctaacaaactaggaggcgtccttgccctattactatccatcctcatcctagcaataatccccatcctccatatatccaaacaacaaagcataatatttcgcccactaagccaatcac

SEQ ID NO: 73230 - DNA, 120 bp, Homo sapiens; identical to SEQ ID NO: 61278
  misc_feature: 686 for SV(C|O) and mtDNA

SEQ ID NO: 73231 - DNA, 120 bp, Homo sapiens
  misc_feature: 686 for SV(C|O) and mtDNA
cattaacaacataaaaccctcattcacacgagaaaacaccctcatgttcatacacctatcccccattctcctcctatccctcaaccccgacatcattaccgggttttcctcttgtaaata

SEQ ID NO: 73232 - DNA, 120 bp, Homo sapiens
  misc_feature: 686 for SV(C|O) and mtDNA
cctcatcgggtgatgatagccaaggtggggataagtgtggtttcgaagaagatataaaatatgattagttctgtggctgtgaatgttataattaaggagatttgtagggagattagtata

SEQ ID NO: 73233 - DNA, 120 bp, Homo sapiens; identical to SEQ ID NO: 52333
  misc_feature: 686 for SV(C|O) and mtDNA

SEQ ID NO: 73234 - DNA, 120 bp, Homo sapiens
  misc_feature: 686 for SV(C|O) and mtDNA
cggtgaagcttcagggggtttggatgagaatggctgttactacgagggctatgtggctgattgaagagtatgcaatgagcgattttaggtctgtttgtcgtaggcagatggagcttgtta

SEQ ID NO: 73235 - DNA, 120 bp, Homo sapiens; identical to SEQ ID NO: 56493
  misc_feature: 686 for SV(C|O) and mtDNA

SEQ ID NO: 73236 - DNA, 120 bp, Homo sapiens
  misc_feature: 686 for SV(C|O) and mtDNA
agaaatatgtctgataaaagagttactttgatagagtaaataataggagcttaaacccccttatttctaggactatgagaatcgaacccatccctgagaatccaaaattctccgtgccac

SEQ ID NO: 73237 - DNA, 120 bp, Homo sapiens
  misc_feature: 686 for SV(C|O) and mtDNA
ggtctgaactcagatcacgtaggactttaatcgttgaacaaacgaacctttaatagcggctgcaccatcgggatgtcctgatccaacatcgaggtcgtaaaccctattgttgatatggac

SEQ ID NO: 73238 - DNA, 120 bp, Homo sapiens; identical to SEQ ID NO: 53214
  misc_feature: 686 for SV(C|O) and mtDNA

SEQ ID NO: 73239 - DNA, 120 bp, Homo sapiens
  misc_feature: 686 for SV(C|O) and mtDNA
cagcaccaaatctccacctccatcatcacctcaacccaaaaaggcataattaaactttacttcctctctttcttcttcccactcatcctaaccctactcctaatcacataacctattccc

SEQ ID NO: 73240 - DNA, 120 bp, Homo sapiens
  misc_feature: 686 for SV(C|O) and mtDNA
ggctttagggagtcataagtggagtccgtaaagaggtatctttactataaaagctattgtgtaagctagtcatattaagttgttggctcaggagtttgatagttcttgggcagtgagagt

SEQ ID NO: 73241 - DNA, 120 bp, Homo sapiens; identical to SEQ ID NO: 57361
  misc_feature: 686 for SV(C|O) and mtDNA

SEQ ID NO: 73242 - DNA, 120 bp, Homo sapiens
  misc_feature: 686 for SV(C|O) and mtDNA
gacagcgatttctaggatagtcagtagaattagaattgtgaagatgataagtgtagagggaaggttaatggttgatattgctagggtggcgcttccaattaggtgcatgagtaggtggcc

SEQ ID NO: 73243 - DNA, 120 bp, Homo sapiens; identical to SEQ ID NO: 58463
  misc_feature: 686 for SV(C|O) and mtDNA

SEQ ID NO: 73244 - DNA, 120 bp, Homo sapiens; identical to SEQ ID NO: 57615
  misc_feature: 686 for SV(C|O) and mtDNA

SEQ ID NO: 73245 - DNA, 120 bp, Homo sapiens; identical to SEQ ID NO: 57362
  misc_feature: 686 for SV(C|O) and mtDNA

SEQ ID NO: 73246 - DNA, 120 bp, Homo sapiens
  misc_feature: 686 for SV(C|O) and mtDNA
ccctaccccccaattaggagggcactggcccccaacaggcatcaccccgctaaatcccctagaagtcccactcctaaacacatccgtattactcgcatcaggagtatcaatcacctgagc

SEQ ID NO: 73247 - DNA, 120 bp, Homo sapiens; identical to SEQ ID NO: 57700
  misc_feature: 686 for SV(C|O) and mtDNA

SEQ ID NO: 73248 - DNA, 120 bp, Homo sapiens
  misc_feature: 686 for SV(C|O) and mtDNA
gcatgagttagcagttcttgtgagctttctcggtaaataaggggtcgtaagcctctgttgtcagattcacaatctgatgttttggttaaactatatttacaagaggaaaacccggtaatg

SEQ ID NO: 73249 - DNA, 120 bp, Homo sapiens
  misc_feature: 686 for SV(C|O) and mtDNA
gcaatgagcgattttaggtctgtttgtcgtaggcagatggagcttgttataattatgcctcatagggatagtacaaggaaggggtaggctatgtgttttgtcagggggttgagaatgagt

SEQ ID NO: 73250 - DNA, 120 bp, Homo sapiens
  misc_feature: 686 for SV(C|O) and mtDNA
aaaggttggggaacagctaaataggttgttgttgatttggttaaaaaatagtagagggatgatgctaataattaggctgtgggtggttgtgttgattcaaattatgtgttttttggaaag

SEQ ID NO: 73251 - DNA, 120 bp, Homo sapiens
  misc_feature: 686 for SV(C|O) and mtDNA
ctatgagaatcgaacccatccctgagaatccaaaattctccgtgccacctatcacaccccatcctaaagtaaggtcagctaaataagctatcgggcccataccccgaaaatgttggttat

SEQ ID NO: 73252 - DNA, 120 bp, Homo sapiens
  misc_feature: 686 for SV(C|O) and mtDNA
ctatagccattatgattattaatgatgagtattgattggtagtattggttatggttcattgtccggagagtatattgttgaagaggatagctattagaaggattatggatgcggttgctt

SEQ ID NO: 73253 - DNA, 120 bp, Homo sapiens
  misc_feature: 686 for SV(C|O) and mtDNA
aattggtatatagtttaaacaaaacgaatgatttcgactcattaaattatgataatcatatttaccaaatgcccctcatttacataaatattatactagcatttaccatctcacttctag

SEQ ID NO: 73254 - DNA, 120 bp, Homo sapiens; identical to SEQ ID NO: 56090
  misc_feature: 686 for SV(C|O) and mtDNA

SEQ ID NO: 73255 - DNA, 120 bp, Homo sapiens
  misc_feature: 686 for SV(C|O) and mtDNA
cagtaaaattgtaataagcagtgcttgaattatttggtttcggttgttttctattagactatggtgagctcaggtgattgatactcctgatgcgagtaatacggatgtgtttaggagtgg

SEQ ID NO: 73256 - DNA, 120 bp, Homo sapiens
  misc_feature: 686 for SV(C|O) and mtDNA
ccactccagcctagcccctaccccccaattaggagggcactggcccccaacaggcatcaccccgctaaatcccctagaagtcccactcctaaacacatccgtattactcgcatcaggagt

SEQ ID NO: 73257 - DNA, 120 bp, Homo sapiens
  misc_feature: 686 for SV(C|O) and mtDNA
cataagtggagtccgtaaagaggtatctttactataaaagctattgtgtaagctagtcatattaagttgttggctcaggagtttgatagttcttgggcagtgagagtgagtagtagaatg

SEQ ID NO: 73258 - DNA, 120 bp, Homo sapiens; identical to SEQ ID NO: 54541
  misc_feature: 686 for SV(C|O) and mtDNA

SEQ ID NO: 73259 - DNA, 120 bp, Homo sapiens
  misc_feature: 686 for SV(C|O) and mtDNA
atatagtttaaacaaaacgaatgatttcgactcattaaattatgataatcatatttaccaaatgcccctcatttacataaatattatactagcatttaccatctcacttctaggaatact

SEQ ID NO: 73260 - DNA, 120 bp, Homo sapiens
  misc_feature: 686 for SV(C|O) and mtDNA
agtggggtatctaatcccagtttgggtcttagctattgtgtgttcagatatgttaaagccactttcgtagtctattttgtgtcagctggagttttttacaactcaggtgagttttagctt

SEQ ID NO: 73261 - DNA, 120 bp, Homo sapiens; identical to SEQ ID NO: 59154
  misc_feature: 686 for SV(C|O) and mtDNA

SEQ ID NO: 73262 - DNA, 120 bp, Homo sapiens
  misc_feature: 686 for SV(C|O) and mtDNA
acaccccttatccccatactagttattatcgaaaccatcagcctactcattcaaccaatagccctggccgtacgcctaaccgctaacattactgcaggccacctactcatgcacctaatt

SEQ ID NO: 73263 - DNA, 120 bp, Homo sapiens
  misc_feature: 685 for SV(C|O) and mtDNA
ttaataatcataatggctatagcaataaaactaggaatagccccctttcacttctgggtcccagaggttacccaaggcacccctctgacatccggcctgcttcttctcacatgacaaaaa

SEQ ID NO: 73264 - DNA, 120 bp, Homo sapiens
  misc_feature: 685 for SV(C|O) and mtDNA
ccccaaaaattttggtgcaactccaaataaaagtaacaaccatgcacactactataaccaccctaaccctgacttccctaattccccccatccttaccaccctcgttaaccctaacaaaa

SEQ ID NO: 73265 - DNA, 120 bp, Homo sapiens; identical to SEQ ID NO: 53619
  misc_feature: 685 for SV(C|O) and mtDNA

SEQ ID NO: 73266 - DNA, 120 bp, Homo sapiens
  misc_feature: 685 for SV(C|O) and mtDNA
taggcctcgcccgatgtgtaggaagaggcagataaagaatattgaggcgccattggcgtgaaggtagcggatgattcagccataatttacgtctcgagtgatgtgggcgattgatgaaaa

SEQ ID NO: 73267 - DNA, 120 bp, Homo sapiens
  misc_feature: 685 for SV(C|O) and mtDNA
tttctctgatttgtccttggaaaaaggttttcatctccggtttacaagactggtgtattagtttatactacaaggacaggcccatttgagtattttgttttcaattagggagatagttgg

SEQ ID NO: 73268 - DNA, 120 bp, Homo sapiens
  misc_feature: 685 for SV(C|O) and mtDNA
aaaaggttggggaacagctaaataggttgttgttgatttggttaaaaaatagtagagggatgatgctaataattaggctgtgggtggttgtgttgattcaaattatgtgttttttggaaa

SEQ ID NO: 73269 - DNA, 120 bp, Homo sapiens
  misc_feature: 685 for SV(C|O) and mtDNA
atcgggcgaggcctatattacggatcatttctctactcagaaacctgaaacatcggcattatcctcctgcttgcaactatagcaacagccttcataggctatgtcctcccgtgaggccaa

SEQ ID NO: 73270 - DNA, 120 bp, Homo sapiens
  misc_feature: 685 for SV(C|O) and mtDNA
ttgcatactcttcaatcagccacatagccctcgtagtaacagccattctcatccaaaccccctgaagcttcaccggcgcagtcattctcataatcgcccacggacttacatcctcattac

SEQ ID NO: 73271 - DNA, 120 bp, Homo sapiens
  misc_feature: 685 for SV(C|O) and mtDNA
ttcgaagcgaaggcttctcaaatcatgaaaattattaatattactgctgttagagaaatgaatgagcctacagatgataggatgtttcatgtggtgtatgcatcggggtagtccgagtaa

SEQ ID NO: 73272 - DNA, 120 bp, Homo sapiens; identical to SEQ ID NO: 58948
  misc_feature: 685 for SV(C|O) and mtDNA

SEQ ID NO: 73273 - DNA, 120 bp, Homo sapiens
  misc_feature: 685 for SV(C|O) and mtDNA
actccaccttactaccagacaaccttagccaaaccatttacccaaataaagtataggcgatagaaattgaaacctggcgcaatagatatagtaccgcaagggaaagatgaaaaattataa

SEQ ID NO: 73274 - DNA, 120 bp, Homo sapiens
  misc_feature: 685 for SV(C|O) and mtDNA
tcttcttagtagctattaccttcttattatttgatctagaaattgccctccttttacccctaccatgagccctacaaacaactaacctaccactaatagttatgtcatccctcttattaa

SEQ ID NO: 73275 - DNA, 120 bp, Homo sapiens
  misc_feature: 685 for SV(C|O) and mtDNA
cccaaaaaggcataattaaactttacttcctctctttcttcttcccactcatcctaaccctactcctaatcacataacctattcccccgagcaatctcaattacaatatatacaccaaca

SEQ ID NO: 73276 - DNA, 120 bp, Homo sapiens
  misc_feature: 685 for SV(C|O) and mtDNA
taaaaccctcattcacacgagaaaacaccctcatgttcatacacctatcccccattctcctcctatccctcaaccccgacatcattaccgggttttcctcttgtaaatatagtttaacca

SEQ ID NO: 73277 - DNA, 120 bp, Homo sapiens
  misc_feature: 685 for SV(C|O) and mtDNA
tatacccacacccacccaagaacagggtttgttaagatggcagagcccggtaatcgcataaaacttaaaactttacagtcagaggttcaattcctcttcttaacaacatacccatggcca

SEQ ID NO: 73278 - DNA, 120 bp, Homo sapiens
  misc_feature: 685 for SV(C|O) and mtDNA
tggccatccccttatgagcgggcgcagtgattataggctttcgctctaagattaaaaatgccctagcccacttcttaccacaaggcacacctacaccccttatccccatactagttatta

SEQ ID NO: 73279 - DNA, 120 bp, Homo sapiens
  misc_feature: 685 for SV(C|O) and mtDNA
tgcatactcttcaatcagccacatagccctcgtagtaacagccattctcatccaaaccccctgaagcttcaccggcgcagtcattctcataatcgcccacggacttacatcctcattact

SEQ ID NO: 73280 - DNA, 120 bp, Homo sapiens
  misc_feature: 685 for SV(C|O) and mtDNA
tattgacccagcgatgggggcttcgacatgggctttagggagtcataagtggagtccgtaaagaggtatctttactataaaagctattgtgtaagctagtcatattaagttgttggctca

SEQ ID NO: 73281 - DNA, 120 bp, Homo sapiens
  misc_feature: 685 for SV(C|O) and mtDNA
gggcctttgcgtagttgtatatagcctagaatttttcgttcggtaagcattaggaatgccattgcgattagaatgggtacaatgaggagtaggaggttggccatgggtatgttgttaaga

SEQ ID NO: 73282 - DNA, 120 bp, Homo sapiens
  misc_feature: 685 for SV(C|O) and mtDNA
tccccactatgcacattttatttctccaacatactcggattctaccctaccatcacacaccgcacaatcccctatctaggccttcttacgagccaaaacctgcccctactcctcctagac

SEQ ID NO: 73283 - DNA, 120 bp, Homo sapiens; identical to SEQ ID NO: 53589
  misc_feature: 685 for SV(C|O) and mtDNA

SEQ ID NO: 73284 - DNA, 120 bp, Homo sapiens
  misc_feature: 685 for SV(C|O) and mtDNA
tagtttaaattagaatcttagctttgggtgctaatggtggagttaaagactttttctctgatttgtccttggaaaaaggttttcatctccggtttacaagactggtgtattagtttatac

SEQ ID NO: 73285 - DNA, 120 bp, Homo sapiens; identical to SEQ ID NO: 55705
  misc_feature: 685 for SV(C|O) and mtDNA

SEQ ID NO: 73286 - DNA, 120 bp, Homo sapiens
  misc_feature: 685 for SV(C|O) and mtDNA
tagcagttcttgtgagctttctcggtaaataaggggtcgtaagcctctgttgtcagattcacaatctgatgttttggttaaactatatttacaagaggaaaacccggtaatgatgtcggg

SEQ ID NO: 73287 - DNA, 120 bp, Homo sapiens
  misc_feature: 685 for SV(C|O) and mtDNA
tactccggtctgaactcagatcacgtaggactttaatcgttgaacaaacgaacctttaatagcggctgcaccatcgggatgtcctgatccaacatcgaggtcgtaaaccctattgttgat

SEQ ID NO: 73288 - DNA, 120 bp, Homo sapiens; identical to SEQ ID NO: 52585
  misc_feature: 685 for SV(C|O) and mtDNA

SEQ ID NO: 73289 - DNA, 120 bp, Homo sapiens; identical to SEQ ID NO: 59985
  misc_feature: 685 for SV(C|O) and mtDNA

SEQ ID NO: 73290 - DNA, 120 bp, Homo sapiens
  misc_feature: 685 for SV(C|O) and mtDNA
acttgcttgtaagcatggggagggggttttgatgtggattgggtttttatgtactacaggtggtcaagtatttatggtaccgtacaatattcatggtggctggcagtaatgtacgaatta

SEQ ID NO: 73291 - DNA, 120 bp, Homo sapiens
  misc_feature: 685 for SV(C|O) and mtDNA
ctgatgaaggctacaaagtaagcgcaagtacccacgtaaagacgttaggtcaaggtgtagcccatgaggtggcaagaaatgggctacattttctaccccagaaaactacgatagccctta

SEQ ID NO: 73292 - DNA, 120 bp, Homo sapiens
  misc_feature: 685 for SV(C|O) and mtDNA
cccactccctcttagccaatattgtgcctattgccatactagtctttgccgcctgcgaagcagcggtgggcctagccctactagtctcaatctccaacacatatggcctagactacgtac

SEQ ID NO: 73293 - DNA, 120 bp, Homo sapiens
  misc_feature: 685 for SV(C|O) and mtDNA
aagaactatcaaactcctgagccaacaacttaatatgactagcttacacaatagcttttatagtaaagatacctctttacggactccacttatgactccctaaagcccatgtcgaagccc

SEQ ID NO: 73294 - DNA, 120 bp, Homo sapiens; identical to SEQ ID NO: 55200
  misc_feature: 685 for SV(C|O) and mtDNA

SEQ ID NO: 73295 - DNA, 120 bp, Homo sapiens
  misc_feature: 685 for SV(C|O) and mtDNA
agatttacagtccaatgcttcactcagccattttacctcacccccactgatgttcgccgaccgttgactattctctacaaaccacaaagacattggaacactatacctattattcggcgc

SEQ ID NO: 73296 - DNA, 120 bp, Homo sapiens
  misc_feature: 685 for SV(C|O) and mtDNA
atagtacttgccgcagtactcttaaaactaggcggctatggtataatacgcctcacactcattctcaaccccctgacaaaacacatagcctaccccttccttgtactatccctatgaggc

SEQ ID NO: 73297 - DNA, 120 bp, Homo sapiens
  misc_feature: 685 for SV(C|O) and mtDNA
gcaccctatgtcgcagtatctgtctttgattcctgcctcatcctattatttatcgcacctacgttcaatattacagacgaacatacttactaaagtgtgttaattaattaatgcttgtag

SEQ ID NO: 73298 - DNA, 120 bp, Homo sapiens; identical to SEQ ID NO: 55520
  misc_feature: 685 for SV(C|O) and mtDNA

SEQ ID NO: 73299 - DNA, 120 bp, Homo sapiens; identical to SEQ ID NO: 58868
  misc_feature: 685 for SV(C|O) and mtDNA

SEQ ID NO: 73300 - DNA, 120 bp, Homo sapiens
  misc_feature: 685 for SV(C|O) and mtDNA
acacccactccctcttagccaatattgtgcctattgccatactagtctttgccgcctgcgaagcagcggtgggcctagccctactagtctcaatctccaacacatatggcctagactacg

SEQ ID NO: 73301 - DNA, 120 bp, Homo sapiens; identical to SEQ ID NO: 55655
  misc_feature: 685 for SV(C|O) and mtDNA

SEQ ID NO: 73302 - DNA, 120 bp, Homo sapiens
  misc_feature: 685 for SV(C|O) and mtDNA
cctcattcacacgagaaaacaccctcatgttcatacacctatcccccattctcctcctatccctcaaccccgacatcattaccgggttttcctcttgtaaatatagtttaaccaaaacat

SEQ ID NO: 73303 - DNA, 120 bp, Homo sapiens; identical to SEQ ID NO: 53116
  misc_feature: 685 for SV(C|O) and mtDNA

SEQ ID NO: 73304 - DNA, 120 bp, Homo sapiens
  misc_feature: 685 for SV(C|O) and mtDNA
caatgagcgattttaggtctgtttgtcgtaggcagatggagcttgttataattatgcctcatagggatagtacaaggaaggggtaggctatgtgttttgtcagggggttgagaatgagtg

SEQ ID NO: 73305 - DNA, 120 bp, Homo sapiens
  misc_feature: 685 for SV(C|O) and mtDNA
cacctcaatcacactactccccatatctaacaacgtaaaaataaaatgacagtttgaacatacaaaacccaccccattcctccccacactcatcgcccttaccacgctactcctacctat

SEQ ID NO: 73306 - DNA, 120 bp, Homo sapiens
  misc_feature: 685 for SV(C|O) and mtDNA
actcatcactagacatcgtactacacgacacgtactacgttgtagctcacttccactatgtcctatcaataggagctgtatttgccatcataggaggcttcattcactgatttcccctat

SEQ ID NO: 73307 - DNA, 120 bp, Homo sapiens
  misc_feature: 685 for SV(C|O) and mtDNA
aaccgaattggtatatagtttaaacaaaacgaatgatttcgactcattaaattatgataatcatatttaccaaatgcccctcatttacataaatattatactagcatttaccatctcact

SEQ ID NO: 73308 - DNA, 120 bp, Homo sapiens; identical to SEQ ID NO: 57426
  misc_feature: 685 for SV(C|O) and mtDNA

SEQ ID NO: 73309 - DNA, 120 bp, Homo sapiens
  misc_feature: 685 for SV(C|O) and mtDNA
aggattagactgaaccgaattggtatatagtttaaacaaaacgaatgatttcgactcattaaattatgataatcatatttaccaaatgcccctcatttacataaatattatactagcatt

SEQ ID NO: 73310 - DNA, 120 bp, Homo sapiens; identical to SEQ ID NO: 57681
  misc_feature: 685 for SV(C|O) and mtDNA

SEQ ID NO: 73311 - DNA, 120 bp, Homo sapiens
  misc_feature: 685 for SV(C|O) and mtDNA
accgtacatagcacattacagtcaaatcccttctcgtccccatggatgacccccctcagataggggtcccttgaccaccatcctccgtgaaatcaatatcccgcacaagagtgctactct

SEQ ID NO: 73312 - DNA, 120 bp, Homo sapiens; identical to SEQ ID NO: 55437
  misc_feature: 685 for SV(C|O) and mtDNA

SEQ ID NO: 73313 - DNA, 120 bp, Homo sapiens
  misc_feature: 684 for SV(C|O) and mtDNA
attaataatcataatggctatagcaataaaactaggaatagccccctttcacttctgggtcccagaggttacccaaggcacccctctgacatccggcctgcttcttctcacatgacaaaa

SEQ ID NO: 73314 - DNA, 120 bp, Homo sapiens
  misc_feature: 684 for SV(C|O) and mtDNA
ttttctctgatttgtccttggaaaaaggttttcatctccggtttacaagactggtgtattagtttatactacaaggacaggcccatttgagtattttgttttcaattagggagatagttg

SEQ ID NO: 73315 - DNA, 120 bp, Homo sapiens; identical to SEQ ID NO: 55739
  misc_feature: 684 for SV(C|O) and mtDNA

SEQ ID NO: 73316 - DNA, 120 bp, Homo sapiens
  misc_feature: 684 for SV(C|O) and mtDNA
gaaaaggttggggaacagctaaataggttgttgttgatttggttaaaaaatagtagagggatgatgctaataattaggctgtgggtggttgtgttgattcaaattatgtgttttttggaa

SEQ ID NO: 73317 - DNA, 120 bp, Homo sapiens
  misc_feature: 684 for SV(C|O) and mtDNA
ttcacaacaatcctaatcctaataccaactatctccctaattgaaaacaaaatactcaaatgggcctgtccttgtagtataaactaatacaccagtcttgtaaaccggagatgaaaacct

SEQ ID NO: 73318 - DNA, 120 bp, Homo sapiens
  misc_feature: 684 for SV(C|O) and mtDNA
ttatgggggtttagtattgattgttagcggtgtggtcgggtgtgttattattctgaattttgggggaggttatatgggtttaatagtttttttaatttatttagggggaatgatggttgt

SEQ ID NO: 73319 - DNA, 120 bp, Homo sapiens
  misc_feature: 684 for SV(C|O) and mtDNA
tacttgccgcagtactcttaaaactaggcggctatggtataatacgcctcacactcattctcaaccccctgacaaaacacatagcctaccccttccttgtactatccctatgaggcataa

SEQ ID NO: 73320 - DNA, 120 bp, Homo sapiens; identical to SEQ ID NO: 54809
  misc_feature: 684 for SV(C|O) and mtDNA

SEQ ID NO: 73321 - DNA, 120 bp, Homo sapiens
  misc_feature: 684 for SV(C|O) and mtDNA
ccgcagtactcttaaaactaggcggctatggtataatacgcctcacactcattctcaaccccctgacaaaacacatagcctaccccttccttgtactatccctatgaggcataattataa

SEQ ID NO: 73322 - DNA, 120 bp, Homo sapiens; identical to SEQ ID NO: 58313
  misc_feature: 684 for SV(C|O) and mtDNA

SEQ ID NO: 73323 - DNA, 120 bp, Homo sapiens
  misc_feature: 684 for SV(C|O) and mtDNA
ttaacaacataaaaccctcattcacacgagaaaacaccctcatgttcatacacctatcccccattctcctcctatccctcaaccccgacatcattaccgggttttcctcttgtaaatata

SEQ ID NO: 73324 - DNA, 120 bp, Homo sapiens
  misc_feature: 684 for SV(C|O) and mtDNA
ccactccctcttagccaatattgtgcctattgccatactagtctttgccgcctgcgaagcagcggtgggcctagccctactagtctcaatctccaacacatatggcctagactacgtaca

SEQ ID NO: 73325 - DNA, 120 bp, Homo sapiens; identical to SEQ ID NO: 56431
  misc_feature: 684 for SV(C|O) and mtDNA

SEQ ID NO: 73326 - DNA, 120 bp, Homo sapiens
  misc_feature: 684 for SV(C|O) and mtDNA
gacaaccttagccaaaccatttacccaaataaagtataggcgatagaaattgaaacctggcgcaatagatatagtaccgcaagggaaagatgaaaaattataaccaagcataatacagca

SEQ ID NO: 73327 - DNA, 120 bp, Homo sapiens
  misc_feature: 684 for SV(C|O) and mtDNA
tagtacttgccgcagtactcttaaaactaggcggctatggtataatacgcctcacactcattctcaaccccctgacaaaacacatagcctaccccttccttgtactatccctatgaggca

SEQ ID NO: 73328 - DNA, 120 bp, Homo sapiens
  misc_feature: 684 for SV(C|O) and mtDNA
cttatgttgtttatgcggggaaacgccatatcgggggcaccgattattaggggaactagtcagttgccaaagcctccgattatgatgggtattactatgaagaagattattacaaatgca

SEQ ID NO: 73329 - DNA, 120 bp, Homo sapiens
  misc_feature: 684 for SV(C|O) and mtDNA
tgagaatcgaacccatccctgagaatccaaaattctccgtgccacctatcacaccccatcctaaagtaaggtcagctaaataagctatcgggcccataccccgaaaatgttggttatacc

SEQ ID NO: 73330 - DNA, 120 bp, Homo sapiens
  misc_feature: 684 for SV(C|O) and mtDNA
agagaggtagagtttttttcgtgatagtggttcactggataagtggcgttggcttgccatgattgtgaggggtaggagtcaggtagttagtattaggaggggggttgttagggggtcgga

SEQ ID NO: 73331 - DNA, 120 bp, Homo sapiens; identical to SEQ ID NO: 54922
  misc_feature: 684 for SV(C|O) and mtDNA

SEQ ID NO: 73332 - DNA, 120 bp, Homo sapiens
  misc_feature: 684 for SV(C|O) and mtDNA
ggcatccatatagtcactccaggtttatggagggttcttctactattaggacttttcgcttcgaagcgaaggcttctcaaatcatgaaaattattaatattactgctgttagagaaatga

SEQ ID NO: 73333 - DNA, 120 bp, Homo sapiens; identical to SEQ ID NO: 53337
  misc_feature: 684 for SV(C|O) and mtDNA

SEQ ID NO: 73334 - DNA, 120 bp, Homo sapiens; identical to SEQ ID NO: 61853
  misc_feature: 684 for SV(C|O) and mtDNA

SEQ ID NO: 73335 - DNA, 120 bp, Homo sapiens; identical to SEQ ID NO: 57691
  misc_feature: 684 for SV(C|O) and mtDNA

SEQ ID NO: 73336 - DNA, 120 bp, Homo sapiens
  misc_feature: 684 for SV(C|O) and mtDNA
tagttgtatatagcctagaatttttcgttcggtaagcattaggaatgccattgcgattagaatgggtacaatgaggagtaggaggttggccatgggtatgttgttaagaagaggaattga

SEQ ID NO: 73337 - DNA, 120 bp, Homo sapiens; identical to SEQ ID NO: 54975
  misc_feature: 684 for SV(C|O) and mtDNA

SEQ ID NO: 73338 - DNA, 120 bp, Homo sapiens
  misc_feature: 684 for SV(C|O) and mtDNA
tacccacacccacccaagaacagggtttgttaagatggcagagcccggtaatcgcataaaacttaaaactttacagtcagaggttcaattcctcttcttaacaacatacccatggccaac

SEQ ID NO: 73339 - DNA, 120 bp, Homo sapiens; identical to SEQ ID NO: 53235
  misc_feature: 684 for SV(C|O) and mtDNA

SEQ ID NO: 73340 - DNA, 120 bp, Homo sapiens
  misc_feature: 684 for SV(C|O) and mtDNA
taaaccctattgttgatatggactctagaataggattgcgctgttatccctagggtaacttgttccgttggtcaagttattggatcaattgagtatagtagttcgctttgactggtgaag

SEQ ID NO: 73341 - DNA, 120 bp, Homo sapiens
  misc_feature: 684 for SV(C|O) and mtDNA
gtttgtcgtaggcagatggagcttgttataattatgcctcatagggatagtacaaggaaggggtaggctatgtgttttgtcagggggttgagaatgagtgtgaggcgtattataccatag

SEQ ID NO: 73342 - DNA, 120 bp, Homo sapiens
  misc_feature: 684 for SV(C|O) and mtDNA
gttggggcctttgcgtagttgtatatagcctagaatttttcgttcggtaagcattaggaatgccattgcgattagaatgggtacaatgaggagtaggaggttggccatgggtatgttgtt

SEQ ID NO: 73343 - DNA, 120 bp, Homo sapiens; identical to SEQ ID NO: 59118
  misc_feature: 684 for SV(C|O) and mtDNA

SEQ ID NO: 73344 - DNA, 120 bp, Homo sapiens
  misc_feature: 684 for SV(C|O) and mtDNA
aacacccactccctcttagccaatattgtgcctattgccatactagtctttgccgcctgcgaagcagcggtgggcctagccctactagtctcaatctccaacacatatggcctagactac

SEQ ID NO: 73345 - DNA, 120 bp, Homo sapiens; identical to SEQ ID NO: 57246
  misc_feature: 684 for SV(C|O) and mtDNA

SEQ ID NO: 73346 - DNA, 120 bp, Homo sapiens
  misc_feature: 684 for SV(C|O) and mtDNA
gaggtcgtaaaccctattgttgatatggactctagaataggattgcgctgttatccctagggtaacttgttccgttggtcaagttattggatcaattgagtatagtagttcgctttgact

SEQ ID NO: 73347 - DNA, 120 bp, Homo sapiens
  misc_feature: 684 for SV(C|O) and mtDNA
ctattgacccagcgatgggggcttcgacatgggctttagggagtcataagtggagtccgtaaagaggtatctttactataaaagctattgtgtaagctagtcatattaagttgttggctc

SEQ ID NO: 73348 - DNA, 120 bp, Homo sapiens; identical to SEQ ID NO: 54646
  misc_feature: 684 for SV(C|O) and mtDNA

SEQ ID NO: 73349 - DNA, 120 bp, Homo sapiens
  misc_feature: 684 for SV(C|O) and mtDNA
cttaaaactaggcggctatggtataatacgcctcacactcattctcaaccccctgacaaaacacatagcctaccccttccttgtactatccctatgaggcataattataacaagctccat

SEQ ID NO: 73350 - DNA, 120 bp, Homo sapiens; identical to SEQ ID NO: 57525
  misc_feature: 684 for SV(C|O) and mtDNA

SEQ ID NO: 73351 - DNA, 120 bp, Homo sapiens
  misc_feature: 684 for SV(C|O) and mtDNA
agagtatgcaatgagcgattttaggtctgtttgtcgtaggcagatggagcttgttataattatgcctcatagggatagtacaaggaaggggtaggctatgtgttttgtcagggggttgag

SEQ ID NO: 73352 - DNA, 120 bp, Homo sapiens; identical to SEQ ID NO: 55630
  misc_feature: 684 for SV(C|O) and mtDNA

SEQ ID NO: 73353 - DNA, 120 bp, Homo sapiens; identical to SEQ ID NO: 57157
  misc_feature: 684 for SV(C|O) and mtDNA

SEQ ID NO: 73354 - DNA, 120 bp, Homo sapiens
  misc_feature: 684 for SV(C|O) and mtDNA
ccctaacaggggccctctcagccctcctaatgacctccggcctagccatgtgatttcacttccactccataacgctcctcatactaggcctactaaccaacacactaaccatataccaat

SEQ ID NO: 73355 - DNA, 120 bp, Homo sapiens
  misc_feature: 684 for SV(C|O) and mtDNA
agcagttcttgtgagctttctcggtaaataaggggtcgtaagcctctgttgtcagattcacaatctgatgttttggttaaactatatttacaagaggaaaacccggtaatgatgtcgggg

SEQ ID NO: 73356 - DNA, 120 bp, Homo sapiens; identical to SEQ ID NO: 55732
  misc_feature: 684 for SV(C|O) and mtDNA

SEQ ID NO: 73357 - DNA, 120 bp, Homo sapiens; identical to SEQ ID NO: 59834
  misc_feature: 684 for SV(C|O) and mtDNA

SEQ ID NO: 73358 - DNA, 120 bp, Homo sapiens; identical to SEQ ID NO: 53270
  misc_feature: 684 for SV(C|O) and mtDNA

SEQ ID NO: 73359 - DNA, 120 bp, Homo sapiens
  misc_feature: 684 for SV(C|O) and mtDNA
aattcttcttagtagctattaccttcttattatttgatctagaaattgccctccttttacccctaccatgagccctacaaacaactaacctaccactaatagttatgtcatccctcttat

SEQ ID NO: 73360 - DNA, 120 bp, Homo sapiens
  misc_feature: 684 for SV(C|O) and mtDNA
aaaccctattgttgatatggactctagaataggattgcgctgttatccctagggtaacttgttccgttggtcaagttattggatcaattgagtatagtagttcgctttgactggtgaagt

SEQ ID NO: 73361 - DNA, 120 bp, Homo sapiens
  misc_feature: 683 for SV(C|O) and mtDNA
cacattaacaacataaaaccctcattcacacgagaaaacaccctcatgttcatacacctatcccccattctcctcctatccctcaaccccgacatcattaccgggttttcctcttgtaaa

SEQ ID NO: 73362 - DNA, 120 bp, Homo sapiens
  misc_feature: 683 for SV(C|O) and mtDNA
aaaaccctcattcacacgagaaaacaccctcatgttcatacacctatcccccattctcctcctatccctcaaccccgacatcattaccgggttttcctcttgtaaatatagtttaaccaa

SEQ ID NO: 73363 - DNA, 120 bp, Homo sapiens
  misc_feature: 683 for SV(C|O) and mtDNA
ttggggcctttgcgtagttgtatatagcctagaatttttcgttcggtaagcattaggaatgccattgcgattagaatgggtacaatgaggagtaggaggttggccatgggtatgttgtta

SEQ ID NO: 73364 - DNA, 120 bp, Homo sapiens
  misc_feature: 683 for SV(C|O) and mtDNA
attacccccatactccttacactattcctcatcacccaactaaaaatattaaacacaaactaccacctacctccctcaccaaagcccataaaaataaaaaattataacaaaccctgagaa

SEQ ID NO: 73365 - DNA, 120 bp, Homo sapiens
  misc_feature: 683 for SV(C|O) and mtDNA
cccttatccccatactagttattatcgaaaccatcagcctactcattcaaccaatagccctggccgtacgcctaaccgctaacattactgcaggccacctactcatgcacctaattggaa

SEQ ID NO: 73366 - DNA, 120 bp, Homo sapiens; identical to SEQ ID NO: 52605
  misc_feature: 683 for SV(C|O) and mtDNA

SEQ ID NO: 73367 - DNA, 120 bp, Homo sapiens; identical to SEQ ID NO: 61714
  misc_feature: 683 for SV(C|O) and mtDNA

SEQ ID NO: 73368 - DNA, 120 bp, Homo sapiens; identical to SEQ ID NO: 56754
  misc_feature: 683 for SV(C|O) and mtDNA

SEQ ID NO: 73369 - DNA, 120 bp, Homo sapiens
  misc_feature: 683 for SV(C|O) and mtDNA
acaccctcatgttcatacacctatcccccattctcctcctatccctcaaccccgacatcattaccgggttttcctcttgtaaatatagtttaaccaaaacatcagattgtgaatctgaca

SEQ ID NO: 73370 - DNA, 120 bp, Homo sapiens; identical to SEQ ID NO: 57740
  misc_feature: 683 for SV(C|O) and mtDNA

SEQ ID NO: 73371 - DNA, 120 bp, Homo sapiens
  misc_feature: 683 for SV(C|O) and mtDNA
agatgggggctagtttttgtcatgtgagaagaagcaggccggatgtcagaggggtgccttgggtaacctctgggacccagaagtgaaagggggctattcctagttttattgctatagcca

SEQ ID NO: 73372 - DNA, 120 bp, Homo sapiens
  misc_feature: 683 for SV(C|O) and mtDNA
gcgcaatagatatagtaccgcaagggaaagatgaaaaattataaccaagcataatacagcaaggactaacccctataccttctgcataatgaattaactagaaataactttgcaaggaga

SEQ ID NO: 73373 - DNA, 120 bp, Homo sapiens; identical to SEQ ID NO: 61490
  misc_feature: 683 for SV(C|O) and mtDNA

SEQ ID NO: 73374 - DNA, 120 bp, Homo sapiens
  misc_feature: 683 for SV(C|O) and mtDNA
agtctaggccatatgtgttggagattgagactagtagggctaggcccaccgctgcttcgcaggcggcaaagactagtatggcaataggcacaatattggctaagagggagtgggtgttga

SEQ ID NO: 73375 - DNA, 120 bp, Homo sapiens
  misc_feature: 683 for SV(C|O) and mtDNA
ctctttcacccacagcaccaatcctacctccatcgctaaccccactaaaacactcaccaagacctcaacccctgacccccatgcctcaggatactcctcaatagccatcgctgtagtata

SEQ ID NO: 73376 - DNA, 120 bp, Homo sapiens
  misc_feature: 683 for SV(C|O) and mtDNA
tagtcaaaccacgtctacaaaatgccagtatcaggcggcggcttcgaagccaaagtgatgtttggatgtaaagtgaaatattagttggcggatgaagcagatagtgaggaaagttgagcc

SEQ ID NO: 73377 - DNA, 120 bp, Homo sapiens
  misc_feature: 683 for SV(C|O) and mtDNA
gaattggtatatagtttaaacaaaacgaatgatttcgactcattaaattatgataatcatatttaccaaatgcccctcatttacataaatattatactagcatttaccatctcacttcta

SEQ ID NO: 73378 - DNA, 120 bp, Homo sapiens
  misc_feature: 683 for SV(C|O) and mtDNA
ggtgtatgcatcggggtagtccgagtaacgtcggggcattccggataggccgagaaagtgttgtgggaagaaagttagatttacgccgatgaatatgatagtgaaatggattttggcgta

SEQ ID NO: 73379 - DNA, 120 bp, Homo sapiens
  misc_feature: 683 for SV(C|O) and mtDNA
actacaaccacgaccaatgatatgaaaaaccatcgttgtatttcaactacaagaacaccaatgaccccaatacgcaaaattaaccccctaataaaattaattaaccactcattcatcgac

SEQ ID NO: 73380 - DNA, 120 bp, Homo sapiens
  misc_feature: 683 for SV(C|O) and mtDNA
ataaaaccctcattcacacgagaaaacaccctcatgttcatacacctatcccccattctcctcctatccctcaaccccgacatcattaccgggttttcctcttgtaaatatagtttaacc

SEQ ID NO: 73381 - DNA, 120 bp, Homo sapiens; identical to SEQ ID NO: 56320
  misc_feature: 683 for SV(C|O) and mtDNA

SEQ ID NO: 73382 - DNA, 120 bp, Homo sapiens
  misc_feature: 683 for SV(C|O) and mtDNA
aattataaccaagcataatacagcaaggactaacccctataccttctgcataatgaattaactagaaataactttgcaaggagagccaaagctaagacccccgaaaccagacgagctacc

SEQ ID NO: 73383 - DNA, 120 bp, Homo sapiens
  misc_feature: 683 for SV(C|O) and mtDNA
gagaatcgaacccatccctgagaatccaaaattctccgtgccacctatcacaccccatcctaaagtaaggtcagctaaataagctatcgggcccataccccgaaaatgttggttataccc

SEQ ID NO: 73384 - DNA, 120 bp, Homo sapiens
  misc_feature: 683 for SV(C|O) and mtDNA
ggggaataggttatgtgattaggagtagggttaggatgagtgggaagaagaaagagaggaagtaaagtttaattatgcctttttgggttgaggtgatgatggaggtggagatttggtgct

SEQ ID NO: 73385 - DNA, 120 bp, Homo sapiens
  misc_feature: 683 for SV(C|O) and mtDNA
atgccaacacagcagccattcaagcaatcctatacaaccgtatcggcgatatcggtttcatcctcgccttagcatgatttatcctacactccaactcatgagacccacaacaaatagccc

SEQ ID NO: 73386 - DNA, 120 bp, Homo sapiens
  misc_feature: 683 for SV(C|O) and mtDNA
accctgatgaaggctacaaagtaagcgcaagtacccacgtaaagacgttaggtcaaggtgtagcccatgaggtggcaagaaatgggctacattttctaccccagaaaactacgatagccc

SEQ ID NO: 73387 - DNA, 120 bp, Homo sapiens
  misc_feature: 683 for SV(C|O) and mtDNA
cccccttccaaacaacaatccccctctacctaaaactcacagccctcgctgtcactttcctaggacttctaacagccctagacctcaactacctaaccaacaaacttaaaataaaatccc

SEQ ID NO: 73388 - DNA, 120 bp, Homo sapiens
  misc_feature: 683 for SV(C|O) and mtDNA
ggctgcttttaggcctactatgggtgttaaattttttactctctctacaaggttttttcctagtgtccaaagagctgttcctctttggactaacagttaaatttacaaggggatttagag

SEQ ID NO: 73389 - DNA, 120 bp, Homo sapiens
  misc_feature: 683 for SV(C|O) and mtDNA
aggacatcccgatggtgcagccgctattaaaggttcgtttgttcaacgattaaagtcctacgtgatctgagttcagaccggagtaatccaggtcggtttctatctacttcaaattcctcc

SEQ ID NO: 73390 - DNA, 120 bp, Homo sapiens
  misc_feature: 683 for SV(C|O) and mtDNA
atagtcaaaccacgtctacaaaatgccagtatcaggcggcggcttcgaagccaaagtgatgtttggatgtaaagtgaaatattagttggcggatgaagcagatagtgaggaaagttgagc

SEQ ID NO: 73391 - DNA, 120 bp, Homo sapiens; identical to SEQ ID NO: 53715
  misc_feature: 683 for SV(C|O) and mtDNA

SEQ ID NO: 73392 - DNA, 120 bp, Homo sapiens
  misc_feature: 683 for SV(C|O) and mtDNA
gacatagggtgctccggctccagcgtctcgcaatgctatcgcgtgcacaccccccagacgaaaataccaaatgcatggagagctcccgtgagtggttaatagggtgatagacctgtgatc

SEQ ID NO: 73393 - DNA, 120 bp, Homo sapiens
  misc_feature: 683 for SV(C|O) and mtDNA
ctttgcgtagttgtatatagcctagaatttttcgttcggtaagcattaggaatgccattgcgattagaatgggtacaatgaggagtaggaggttggccatgggtatgttgttaagaagag

SEQ ID NO: 73394 - DNA, 120 bp, Homo sapiens; identical to SEQ ID NO: 55653
  misc_feature: 683 for SV(C|O) and mtDNA

SEQ ID NO: 73395 - DNA, 120 bp, Homo sapiens
  misc_feature: 683 for SV(C|O) and mtDNA
ctcatcgggtgatgatagccaaggtggggataagtgtggtttcgaagaagatataaaatatgattagttctgtggctgtgaatgttataattaaggagatttgtagggagattagtatag

SEQ ID NO: 73396 - DNA, 120 bp, Homo sapiens
  misc_feature: 683 for SV(C|O) and mtDNA
aatccccactatgcacattttatttctccaacatactcggattctaccctaccatcacacaccgcacaatcccctatctaggccttcttacgagccaaaacctgcccctactcctcctag

SEQ ID NO: 73397 - DNA, 120 bp, Homo sapiens
  misc_feature: 683 for SV(C|O) and mtDNA
cgcgtgcacaccccccagacgaaaataccaaatgcatggagagctcccgtgagtggttaatagggtgatagacctgtgatccatcgtgatgtcttatttaaggggaacgtgtgggctatt

SEQ ID NO: 73398 - DNA, 120 bp, Homo sapiens; identical to SEQ ID NO: 59099
  misc_feature: 683 for SV(C|O) and mtDNA

SEQ ID NO: 73399 - DNA, 120 bp, Homo sapiens
  misc_feature: 683 for SV(C|O) and mtDNA
ccctgatgaaggctacaaagtaagcgcaagtacccacgtaaagacgttaggtcaaggtgtagcccatgaggtggcaagaaatgggctacattttctaccccagaaaactacgatagccct

SEQ ID NO: 73400 - DNA, 120 bp, Homo sapiens
  misc_feature: 683 for SV(C|O) and mtDNA
atgaggatggatagtaatagggcaaggacgcctcctagtttgttagggacggatcggagaattgtgtaggcgaataggaaatatcattcgggcttgatgtggggaggggtgtttaagggg

SEQ ID NO: 73401 - DNA, 120 bp, Homo sapiens
  misc_feature: 683 for SV(C|O) and mtDNA
ccagtaaaattgtaataagcagtgcttgaattatttggtttcggttgttttctattagactatggtgagctcaggtgattgatactcctgatgcgagtaatacggatgtgtttaggagtg

SEQ ID NO: 73402 - DNA, 120 bp, Homo sapiens
  misc_feature: 683 for SV(C|O) and mtDNA
atccatatagtcactccaggtttatggagggttcttctactattaggacttttcgcttcgaagcgaaggcttctcaaatcatgaaaattattaatattactgctgttagagaaatgaatg

SEQ ID NO: 73403 - DNA, 120 bp, Homo sapiens
  misc_feature: 683 for SV(C|O) and mtDNA
catactcttcaatcagccacatagccctcgtagtaacagccattctcatccaaaccccctgaagcttcaccggcgcagtcattctcataatcgcccacggacttacatcctcattactat

SEQ ID NO: 73404 - DNA, 120 bp, Homo sapiens
  misc_feature: 683 for SV(C|O) and mtDNA
aggtcgtaaaccctattgttgatatggactctagaataggattgcgctgttatccctagggtaacttgttccgttggtcaagttattggatcaattgagtatagtagttcgctttgactg

SEQ ID NO: 73405 - DNA, 120 bp, Homo sapiens; identical to SEQ ID NO: 54870
  misc_feature: 683 for SV(C|O) and mtDNA

SEQ ID NO: 73406 - DNA, 120 bp, Homo sapiens
  misc_feature: 683 for SV(C|O) and mtDNA
caacataaaaccctcattcacacgagaaaacaccctcatgttcatacacctatcccccattctcctcctatccctcaaccccgacatcattaccgggttttcctcttgtaaatatagttt

SEQ ID NO: 73407 - DNA, 120 bp, Homo sapiens
  misc_feature: 683 for SV(C|O) and mtDNA
acattaacaacataaaaccctcattcacacgagaaaacaccctcatgttcatacacctatcccccattctcctcctatccctcaaccccgacatcattaccgggttttcctcttgtaaat

SEQ ID NO: 73408 - DNA, 120 bp, Homo sapiens; identical to SEQ ID NO: 54962
  misc_feature: 683 for SV(C|O) and mtDNA

SEQ ID NO: 73409 - DNA, 120 bp, Homo sapiens; identical to SEQ ID NO: 59002
  misc_feature: 683 for SV(C|O) and mtDNA

SEQ ID NO: 73410 - DNA, 120 bp, Homo sapiens
  misc_feature: 683 for SV(C|O) and mtDNA
acacccacccaagaacagggtttgttaagatggcagagcccggtaatcgcataaaacttaaaactttacagtcagaggttcaattcctcttcttaacaacatacccatggccaacctcct

SEQ ID NO: 73411 - DNA, 120 bp, Homo sapiens
  misc_feature: 683 for SV(C|O) and mtDNA
aaaattcttcttagtagctattaccttcttattatttgatctagaaattgccctccttttacccctaccatgagccctacaaacaactaacctaccactaatagttatgtcatccctctt

SEQ ID NO: 73412 - DNA, 120 bp, Homo sapiens
  misc_feature: 682 for SV(C|O) and mtDNA
ttttcaccgtaggcggcctgactggcattgtattagcaaactcatcactagacatcgtactacacgacacgtactacgttgtagctcacttccactatgtcctatcaataggagctgtat

SEQ ID NO: 73413 - DNA, 120 bp, Homo sapiens; identical to SEQ ID NO: 59448
  misc_feature: 682 for SV(C|O) and mtDNA

SEQ ID NO: 73414 - DNA, 120 bp, Homo sapiens; identical to SEQ ID NO: 57163
  misc_feature: 682 for SV(C|O) and mtDNA

SEQ ID NO: 73415 - DNA, 120 bp, Homo sapiens
  misc_feature: 682 for SV(C|O) and mtDNA
ccaaaaaggcataattaaactttacttcctctctttcttcttcccactcatcctaaccctactcctaatcacataacctattcccccgagcaatctcaattacaatatatacaccaacaa

SEQ ID NO: 73416 - DNA, 120 bp, Homo sapiens; identical to SEQ ID NO: 54832
  misc_feature: 682 for SV(C|O) and mtDNA

SEQ ID NO: 73417 - DNA, 120 bp, Homo sapiens
  misc_feature: 682 for SV(C|O) and mtDNA
gtaaaccctattgttgatatggactctagaataggattgcgctgttatccctagggtaacttgttccgttggtcaagttattggatcaattgagtatagtagttcgctttgactggtgaa

SEQ ID NO: 73418 - DNA, 120 bp, Homo sapiens
  misc_feature: 682 for SV(C|O) and mtDNA
ttagtatagagaggtagagtttttttcgtgatagtggttcactggataagtggcgttggcttgccatgattgtgaggggtaggagtcaggtagttagtattaggaggggggttgttaggg

SEQ ID NO: 73419 - DNA, 120 bp, Homo sapiens; identical to SEQ ID NO: 57989
  misc_feature: 682 for SV(C|O) and mtDNA

SEQ ID NO: 73420 - DNA, 120 bp, Homo sapiens
  misc_feature: 682 for SV(C|O) and mtDNA
gggcccgatagcttatttagctgaccttactttaggatggggtgtgataggtggcacggagaattttggattctcagggatgggttcgattctcatagtcctagaaataagggggtttaa

SEQ ID NO: 73421 - DNA, 120 bp, Homo sapiens; identical to SEQ ID NO: 55506
  misc_feature: 682 for SV(C|O) and mtDNA

SEQ ID NO: 73422 - DNA, 120 bp, Homo sapiens; identical to SEQ ID NO: 54919
  misc_feature: 682 for SV(C|O) and mtDNA

SEQ ID NO: 73423 - DNA, 120 bp, Homo sapiens; identical to SEQ ID NO: 57601
  misc_feature: 682 for SV(C|O) and mtDNA

SEQ ID NO: 73424 - DNA, 120 bp, Homo sapiens
  misc_feature: 682 for SV(C|O) and mtDNA
gagtatgcaatgagcgattttaggtctgtttgtcgtaggcagatggagcttgttataattatgcctcatagggatagtacaaggaaggggtaggctatgtgttttgtcagggggttgaga

SEQ ID NO: 73425 - DNA, 120 bp, Homo sapiens
  misc_feature: 682 for SV(C|O) and mtDNA
atccccactatgcacattttatttctccaacatactcggattctaccctaccatcacacaccgcacaatcccctatctaggccttcttacgagccaaaacctgcccctactcctcctaga

SEQ ID NO: 73426 - DNA, 120 bp, Homo sapiens; identical to SEQ ID NO: 55423
  misc_feature: 682 for SV(C|O) and mtDNA

SEQ ID NO: 73427 - DNA, 120 bp, Homo sapiens
  misc_feature: 682 for SV(C|O) and mtDNA
cggtctgaactcagatcacgtaggactttaatcgttgaacaaacgaacctttaatagcggctgcaccatcgggatgtcctgatccaacatcgaggtcgtaaaccctattgttgatatgga

SEQ ID NO: 73428 - DNA, 120 bp, Homo sapiens; identical to SEQ ID NO: 54498
  misc_feature: 682 for SV(C|O) and mtDNA

SEQ ID NO: 73429 - DNA, 120 bp, Homo sapiens; identical to SEQ ID NO: 61220
  misc_feature: 682 for SV(C|O) and mtDNA

SEQ ID NO: 73430 - DNA, 120 bp, Homo sapiens
  misc_feature: 682 for SV(C|O) and mtDNA
tattatgcttggttataatttttcatctttcccttgcggtactatatctattgcgccaggtttcaatttctatcgcctatactttatttgggtaaatggtttggctaaggttgtctggta

SEQ ID NO: 73431 - DNA, 120 bp, Homo sapiens; identical to SEQ ID NO: 53108
  misc_feature: 682 for SV(C|O) and mtDNA

SEQ ID NO: 73432 - DNA, 120 bp, Homo sapiens; identical to SEQ ID NO: 55886
  misc_feature: 682 for SV(C|O) and mtDNA

SEQ ID NO: 73433 - DNA, 120 bp, Homo sapiens
  misc_feature: 682 for SV(C|O) and mtDNA
aggaatagtgtaaggagtatgggggtaattatggtgggccatacggtagtatttagttggggcatttcactgtaaagaggtgttggttctcttaatctttaacttaaaaggttaatgcta

SEQ ID NO: 73434 - DNA, 120 bp, Homo sapiens
  misc_feature: 682 for SV(C|O) and mtDNA
taaaattcttcttagtagctattaccttcttattatttgatctagaaattgccctccttttacccctaccatgagccctacaaacaactaacctaccactaatagttatgtcatccctct

SEQ ID NO: 73435 - DNA, 120 bp, Homo sapiens
  misc_feature: 682 for SV(C|O) and mtDNA
accctcatgttcatacacctatcccccattctcctcctatccctcaaccccgacatcattaccgggttttcctcttgtaaatatagtttaaccaaaacatcagattgtgaatctgacaac

SEQ ID NO: 73436 - DNA, 120 bp, Homo sapiens
  misc_feature: 682 for SV(C|O) and mtDNA
gcgatagcattgcgagacgctggagccggagcaccctatgtcgcagtatctgtctttgattcctgcctcatcctattatttatcgcacctacgttcaatattacagacgaacatacttac

SEQ ID NO: 73437 - DNA, 120 bp, Homo sapiens
  misc_feature: 682 for SV(C|O) and mtDNA
agctgcttcttcgaatttgcaattcaatatgaaaatcacctcggagctggtaaaaagaggcctaacccctgtctttagatttacagtccaatgcttcactcagccattttacctcacccc

SEQ ID NO: 73438 - DNA, 120 bp, Homo sapiens
  misc_feature: 682 for SV(C|O) and mtDNA
caagaactatcaaactcctgagccaacaacttaatatgactagcttacacaatagcttttatagtaaagatacctctttacggactccacttatgactccctaaagcccatgtcgaagcc

SEQ ID NO: 73439 - DNA, 120 bp, Homo sapiens
  misc_feature: 682 for SV(C|O) and mtDNA
atccccatactagttattatcgaaaccatcagcctactcattcaaccaatagccctggccgtacgcctaaccgctaacattactgcaggccacctactcatgcacctaattggaagcgcc

SEQ ID NO: 73440 - DNA, 120 bp, Homo sapiens
  misc_feature: 682 for SV(C|O) and mtDNA
aatgatatgaaaaaccatcgttgtatttcaactacaagaacaccaatgaccccaatacgcaaaattaaccccctaataaaattaattaaccactcattcatcgacctccccaccccatcc

SEQ ID NO: 73441 - DNA, 120 bp, Homo sapiens; identical to SEQ ID NO: 58740
  misc_feature: 682 for SV(C|O) and mtDNA

SEQ ID NO: 73442 - DNA, 120 bp, Homo sapiens
  misc_feature: 682 for SV(C|O) and mtDNA
gaatgccattgcgattagaatgggtacaatgaggagtaggaggttggccatgggtatgttgttaagaagaggaattgaacctctgactgtaaagttttaagttttatgcgattaccgggc

SEQ ID NO: 73443 - DNA, 120 bp, Homo sapiens; identical to SEQ ID NO: 61965
  misc_feature: 682 for SV(C|O) and mtDNA

SEQ ID NO: 73444 - DNA, 120 bp, Homo sapiens
  misc_feature: 682 for SV(C|O) and mtDNA
gagaggtagagtttttttcgtgatagtggttcactggataagtggcgttggcttgccatgattgtgaggggtaggagtcaggtagttagtattaggaggggggttgttagggggtcggag

SEQ ID NO: 73445 - DNA, 120 bp, Homo sapiens
  misc_feature: 682 for SV(C|O) and mtDNA
ctaccacacattcgaagaacccgtatacataaaatctagacaaaaaaggaaggaatcgaaccccccaaagctggtttcaagccaaccccatggcctccatgactttttcaaaaaggtatt

SEQ ID NO: 73446 - DNA, 120 bp, Homo sapiens; identical to SEQ ID NO: 57504
  misc_feature: 682 for SV(C|O) and mtDNA

SEQ ID NO: 73447 - DNA, 120 bp, Homo sapiens
  misc_feature: 682 for SV(C|O) and mtDNA
cgaattggtatatagtttaaacaaaacgaatgatttcgactcattaaattatgataatcatatttaccaaatgcccctcatttacataaatattatactagcatttaccatctcacttct

SEQ ID NO: 73448 - DNA, 120 bp, Homo sapiens
  misc_feature: 682 for SV(C|O) and mtDNA
ccgagcctggtgatagctggttgtccaagatagaatcttagttcaactttaaatttgcccacagaaccctctaaatccccttgtaaatttaactgttagtccaaagaggaacagctcttt

SEQ ID NO: 73449 - DNA, 120 bp, Homo sapiens
  misc_feature: 682 for SV(C|O) and mtDNA
cccacacccacccaagaacagggtttgttaagatggcagagcccggtaatcgcataaaacttaaaactttacagtcagaggttcaattcctcttcttaacaacatacccatggccaacct

SEQ ID NO: 73450 - DNA, 120 bp, Homo sapiens
  misc_feature: 682 for SV(C|O) and mtDNA
atgtggtgtatgcatcggggtagtccgagtaacgtcggggcattccggataggccgagaaagtgttgtgggaagaaagttagatttacgccgatgaatatgatagtgaaatggattttgg

SEQ ID NO: 73451 - DNA, 120 bp, Homo sapiens; identical to SEQ ID NO: 56852
  misc_feature: 682 for SV(C|O) and mtDNA

SEQ ID NO: 73452 - DNA, 120 bp, Homo sapiens
  misc_feature: 682 for SV(C|O) and mtDNA
cacacgagaaaacaccctcatgttcatacacctatcccccattctcctcctatccctcaaccccgacatcattaccgggttttcctcttgtaaatatagtttaaccaaaacatcagattg

SEQ ID NO: 73453 - DNA, 120 bp, Homo sapiens
  misc_feature: 682 for SV(C|O) and mtDNA
caacaatcctaatcctaataccaactatctccctaattgaaaacaaaatactcaaatgggcctgtccttgtagtataaactaatacaccagtcttgtaaaccggagatgaaaaccttttt

SEQ ID NO: 73454 - DNA, 120 bp, Homo sapiens
  misc_feature: 682 for SV(C|O) and mtDNA
aaattttggtgcaactccaaataaaagtaacaaccatgcacactactataaccaccctaaccctgacttccctaattccccccatccttaccaccctcgttaaccctaacaaaaaaaact

SEQ ID NO: 73455 - DNA, 120 bp, Homo sapiens; identical to SEQ ID NO: 59477
  misc_feature: 682 for SV(C|O) and mtDNA

SEQ ID NO: 73456 - DNA, 120 bp, Homo sapiens
  misc_feature: 682 for SV(C|O) and mtDNA
accgagcctggtgatagctggttgtccaagatagaatcttagttcaactttaaatttgcccacagaaccctctaaatccccttgtaaatttaactgttagtccaaagaggaacagctctt

SEQ ID NO: 73457 - DNA, 120 bp, Homo sapiens
  misc_feature: 681 for SV(C|O) and mtDNA
cattaataatcataatggctatagcaataaaactaggaatagccccctttcacttctgggtcccagaggttacccaaggcacccctctgacatccggcctgcttcttctcacatgacaaa

SEQ ID NO: 73458 - DNA, 120 bp, Homo sapiens
  misc_feature: 681 for SV(C|O) and mtDNA
tttcgtgatagtggttcactggataagtggcgttggcttgccatgattgtgaggggtaggagtcaggtagttagtattaggaggggggttgttagggggtcggaggaaaaggttggggaa

SEQ ID NO: 73459 - DNA, 120 bp, Homo sapiens; identical to SEQ ID NO: 56480
  misc_feature: 681 for SV(C|O) and mtDNA

SEQ ID NO: 73460 - DNA, 120 bp, Homo sapiens
  misc_feature: 681 for SV(C|O) and mtDNA
ttgccgcagtactcttaaaactaggcggctatggtataatacgcctcacactcattctcaaccccctgacaaaacacatagcctaccccttccttgtactatccctatgaggcataatta

SEQ ID NO: 73461 - DNA, 120 bp, Homo sapiens
  misc_feature: 681 for SV(C|O) and mtDNA
ttctctgatttgtccttggaaaaaggttttcatctccggtttacaagactggtgtattagtttatactacaaggacaggcccatttgagtattttgttttcaattagggagatagttggt

SEQ ID NO: 73462 - DNA, 120 bp, Homo sapiens
  misc_feature: 681 for SV(C|O) and mtDNA
gtattagttagttttgttgtgagtgttaggaaaagggcatacaggactaggaagcagataaggaaaatgattatgagggcgtgatcatgaaaggtgataagctcttctatgataggggaa

SEQ ID NO: 73463 - DNA, 120 bp, Homo sapiens; identical to SEQ ID NO: 61360
  misc_feature: 681 for SV(C|O) and mtDNA

SEQ ID NO: 73464 - DNA, 120 bp, Homo sapiens; identical to SEQ ID NO: 61200
  misc_feature: 681 for SV(C|O) and mtDNA

SEQ ID NO: 73465 - DNA, 120 bp, Homo sapiens
  misc_feature: 681 for SV(C|O) and mtDNA
tcgtgatagtggttcactggataagtggcgttggcttgccatgattgtgaggggtaggagtcaggtagttagtattaggaggggggttgttagggggtcggaggaaaaggttggggaaca

SEQ ID NO: 73466 - DNA, 120 bp, Homo sapiens
  misc_feature: 681 for SV(C|O) and mtDNA
tacagtcaaatcccttctcgtccccatggatgacccccctcagataggggtcccttgaccaccatcctccgtgaaatcaatatcccgcacaagagtgctactctcctcgctccgggccca

SEQ ID NO: 73467 - DNA, 120 bp, Homo sapiens
  misc_feature: 681 for SV(C|O) and mtDNA
tccccatactagttattatcgaaaccatcagcctactcattcaaccaatagccctggccgtacgcctaaccgctaacattactgcaggccacctactcatgcacctaattggaagcgcca

SEQ ID NO: 73468 - DNA, 120 bp, Homo sapiens
  misc_feature: 681 for SV(C|O) and mtDNA
tatggagctttaatttattaatgcaaacagtacctaacaaacccacaggtcctaaactaccaaacctgcattaaaaatttcggttggggcgacctcggagcagaacccaacctccgagca

SEQ ID NO: 73469 - DNA, 120 bp, Homo sapiens; identical to SEQ ID NO: 54549
  misc_feature: 681 for SV(C|O) and mtDNA

SEQ ID NO: 73470 - DNA, 120 bp, Homo sapiens
  misc_feature: 681 for SV(C|O) and mtDNA
tccattggtcttaggccccaaaaattttggtgcaactccaaataaaagtaacaaccatgcacactactataaccaccctaaccctgacttccctaattccccccatccttaccaccctcg

SEQ ID NO: 73471 - DNA, 120 bp, Homo sapiens
  misc_feature: 681 for SV(C|O) and mtDNA
gtatatagtttaaacaaaacgaatgatttcgactcattaaattatgataatcatatttaccaaatgcccctcatttacataaatattatactagcatttaccatctcacttctaggaata

SEQ ID NO: 73472 - DNA, 120 bp, Homo sapiens
  misc_feature: 681 for SV(C|O) and mtDNA
tattatacccacacccacccaagaacagggtttgttaagatggcagagcccggtaatcgcataaaacttaaaactttacagtcagaggttcaattcctcttcttaacaacatacccatgg

SEQ ID NO: 73473 - DNA, 120 bp, Homo sapiens
  misc_feature: 681 for SV(C|O) and mtDNA
tatgggggtttagtattgattgttagcggtgtggtcgggtgtgttattattctgaattttgggggaggttatatgggtttaatagtttttttaatttatttagggggaatgatggttgtc

SEQ ID NO: 73474 - DNA, 120 bp, Homo sapiens
  misc_feature: 681 for SV(C|O) and mtDNA
atgttagtattagttagttttgttgtgagtgttaggaaaagggcatacaggactaggaagcagataaggaaaatgattatgagggcgtgatcatgaaaggtgataagctcttctatgata

SEQ ID NO: 73475 - DNA, 120 bp, Homo sapiens; identical to SEQ ID NO: 57332
  misc_feature: 681 for SV(C|O) and mtDNA

SEQ ID NO: 73476 - DNA, 120 bp, Homo sapiens
  misc_feature: 681 for SV(C|O) and mtDNA
gaaatcagtgaatgaagcctcctatgatggcaaatacagctcctattgataggacatagtggaagtgagctacaacgtagtacgtgtcgtgtagtacgatgtctagtgatgagtttgcta

SEQ ID NO: 73477 - DNA, 120 bp, Homo sapiens; identical to SEQ ID NO: 54883
  misc_feature: 681 for SV(C|O) and mtDNA

SEQ ID NO: 73478 - DNA, 120 bp, Homo sapiens
  misc_feature: 681 for SV(C|O) and mtDNA
acccactccctcttagccaatattgtgcctattgccatactagtctttgccgcctgcgaagcagcggtgggcctagccctactagtctcaatctccaacacatatggcctagactacgta

SEQ ID NO: 73479 - DNA, 120 bp, Homo sapiens; identical to SEQ ID NO: 55887
  misc_feature: 681 for SV(C|O) and mtDNA

SEQ ID NO: 73480 - DNA, 120 bp, Homo sapiens
  misc_feature: 681 for SV(C|O) and mtDNA
taaatccaccttcgacccttaagtttcataagggctatcgtagttttctggggtagaaaatgtagcccatttcttgccacctcatgggctacaccttgacctaacgtctttacgtgggta

SEQ ID NO: 73481 - DNA, 120 bp, Homo sapiens; identical to SEQ ID NO: 59432
  misc_feature: 681 for SV(C|O) and mtDNA

SEQ ID NO: 73482 - DNA, 120 bp, Homo sapiens
  misc_feature: 681 for SV(C|O) and mtDNA
acccaaaaaggcataattaaactttacttcctctctttcttcttcccactcatcctaaccctactcctaatcacataacctattcccccgagcaatctcaattacaatatatacaccaac

SEQ ID NO: 73483 - DNA, 120 bp, Homo sapiens
  misc_feature: 681 for SV(C|O) and mtDNA
gttgattcgggaggatcctattggtgcgggggctttgtatgattatgggcgttgattagtagtagttactggttgaacattgtttgttggtgtatatattgtaattgagattgctcgggg

SEQ ID NO: 73484 - DNA, 120 bp, Homo sapiens
  misc_feature: 681 for SV(C|O) and mtDNA
caaatcccttctcgtccccatggatgacccccctcagataggggtcccttgaccaccatcctccgtgaaatcaatatcccgcacaagagtgctactctcctcgctccgggcccataacac

SEQ ID NO: 73485 - DNA, 120 bp, Homo sapiens; identical to SEQ ID NO: 56910
  misc_feature: 681 for SV(C|O) and mtDNA

SEQ ID NO: 73486 - DNA, 120 bp, Homo sapiens
  misc_feature: 681 for SV(C|O) and mtDNA
gtatgcatcggggtagtccgagtaacgtcggggcattccggataggccgagaaagtgttgtgggaagaaagttagatttacgccgatgaatatgatagtgaaatggattttggcgtaggt

SEQ ID NO: 73487 - DNA, 120 bp, Homo sapiens
  misc_feature: 681 for SV(C|O) and mtDNA
atgagaatcgaacccatccctgagaatccaaaattctccgtgccacctatcacaccccatcctaaagtaaggtcagctaaataagctatcgggcccataccccgaaaatgttggttatac

SEQ ID NO: 73488 - DNA, 120 bp, Homo sapiens; identical to SEQ ID NO: 59120
  misc_feature: 681 for SV(C|O) and mtDNA

SEQ ID NO: 73489 - DNA, 120 bp, Homo sapiens
  misc_feature: 681 for SV(C|O) and mtDNA
actaatcaacgcccataatcatacaaagcccccgcaccaataggatcctcccgaatcaaccctgacccctctccttcataaattattcagcttcctacactattaaagtttaccacaacc

SEQ ID NO: 73490 - DNA, 120 bp, Homo sapiens; identical to SEQ ID NO: 57494
  misc_feature: 681 for SV(C|O) and mtDNA

SEQ ID NO: 73491 - DNA, 120 bp, Homo sapiens; identical to SEQ ID NO: 57174
  misc_feature: 681 for SV(C|O) and mtDNA

SEQ ID NO: 73492 - DNA, 120 bp, Homo sapiens; identical to SEQ ID NO: 54420
  misc_feature: 681 for SV(C|O) and mtDNA

SEQ ID NO: 73493 - DNA, 120 bp, Homo sapiens; identical to SEQ ID NO: 57726
  misc_feature: 681 for SV(C|O) and mtDNA

SEQ ID NO: 73494 - DNA, 120 bp, Homo sapiens
  misc_feature: 681 for SV(C|O) and mtDNA
gggggaataggttatgtgattaggagtagggttaggatgagtgggaagaagaaagagaggaagtaaagtttaattatgcctttttgggttgaggtgatgatggaggtggagatttggtgc

SEQ ID NO: 73495 - DNA, 120 bp, Homo sapiens
  misc_feature: 681 for SV(C|O) and mtDNA
ggcgtcaaagtatttagctgactcgccacactccacggaagcaatatgaaatgatctgctgcagtgctctgagccctaggattcatctttcttttcaccgtaggcggcctgactggcatt

SEQ ID NO: 73496 - DNA, 120 bp, Homo sapiens
  misc_feature: 681 for SV(C|O) and mtDNA
ggattagactgaaccgaattggtatatagtttaaacaaaacgaatgatttcgactcattaaattatgataatcatatttaccaaatgcccctcatttacataaatattatactagcattt

SEQ ID NO: 73497 - DNA, 120 bp, Homo sapiens; identical to SEQ ID NO: 57813
  misc_feature: 681 for SV(C|O) and mtDNA

SEQ ID NO: 73498 - DNA, 120 bp, Homo sapiens
  misc_feature: 681 for SV(C|O) and mtDNA
gatagttcttgggcagtgagagtgagtagtagaatgtttagtgagcctagggtgttgtgagtgtaaattagtgcgatgagtaggggaagggagcctactagggtgtagaataggaagtat

SEQ ID NO: 73499 - DNA, 120 bp, Homo sapiens
  misc_feature: 681 for SV(C|O) and mtDNA
gaagaagatataaaatatgattagttctgtggctgtgaatgttataattaaggagatttgtagggagattagtatagagaggtagagtttttttcgtgatagtggttcactggataagtg

SEQ ID NO: 73500 - DNA, 120 bp, Homo sapiens; identical to SEQ ID NO: 55176
  misc_feature: 681 for SV(C|O) and mtDNA

SEQ ID NO: 73501 - DNA, 120 bp, Homo sapiens; identical to SEQ ID NO: 58785
  misc_feature: 681 for SV(C|O) and mtDNA

SEQ ID NO: 73502 - DNA, 120 bp, Homo sapiens; identical to SEQ ID NO: 55496
  misc_feature: 681 for SV(C|O) and mtDNA

SEQ ID NO: 73503 - DNA, 120 bp, Homo sapiens
  misc_feature: 681 for SV(C|O) and mtDNA
ctaacaaactaggaggcgtccttgccctattactatccatcctcatcctagcaataatccccatcctccatatatccaaacaacaaagcataatatttcgcccactaagccaatcacttt

SEQ ID NO: 73504 - DNA, 120 bp, Homo sapiens
  misc_feature: 681 for SV(C|O) and mtDNA
atcctatttattacctcagaagtttttttcttcgcaggatttttctgagccttttaccactccagcctagcccctaccccccaattaggagggcactggcccccaacaggcatcaccccg

SEQ ID NO: 73505 - DNA, 120 bp, Homo sapiens
  misc_feature: 681 for SV(C|O) and mtDNA
cgatagcattgcgagacgctggagccggagcaccctatgtcgcagtatctgtctttgattcctgcctcatcctattatttatcgcacctacgttcaatattacagacgaacatacttact

SEQ ID NO: 73506 - DNA, 120 bp, Homo sapiens; identical to SEQ ID NO: 52946
  misc_feature: 681 for SV(C|O) and mtDNA

SEQ ID NO: 73507 - DNA, 120 bp, Homo sapiens; identical to SEQ ID NO: 59055
  misc_feature: 681 for SV(C|O) and mtDNA

SEQ ID NO: 73508 - DNA, 120 bp, Homo sapiens
  misc_feature: 681 for SV(C|O) and mtDNA
cagcctagcccctaccccccaattaggagggcactggcccccaacaggcatcaccccgctaaatcccctagaagtcccactcctaaacacatccgtattactcgcatcaggagtatcaat

SEQ ID NO: 73509 - DNA, 120 bp, Homo sapiens; identical to SEQ ID NO: 58327
  misc_feature: 681 for SV(C|O) and mtDNA

SEQ ID NO: 73510 - DNA, 120 bp, Homo sapiens
  misc_feature: 681 for SV(C|O) and mtDNA
aaaacactcaccaagacctcaacccctgacccccatgcctcaggatactcctcaatagccatcgctgtagtatatccaaagacaaccatcattccccctaaataaattaaaaaaactatt

SEQ ID NO: 73511 - DNA, 120 bp, Homo sapiens
  misc_feature: 680 for SV(C|O) and mtDNA
tttgtcgtaggcagatggagcttgttataattatgcctcatagggatagtacaaggaaggggtaggctatgtgttttgtcagggggttgagaatgagtgtgaggcgtattataccatagc

SEQ ID NO: 73512 - DNA, 120 bp, Homo sapiens; identical to SEQ ID NO: 60502
  misc_feature: 680 for SV(C|O) and mtDNA

SEQ ID NO: 73513 - DNA, 120 bp, Homo sapiens
  misc_feature: 680 for SV(C|O) and mtDNA
atacccacacccacccaagaacagggtttgttaagatggcagagcccggtaatcgcataaaacttaaaactttacagtcagaggttcaattcctcttcttaacaacatacccatggccaa

SEQ ID NO: 73514 - DNA, 120 bp, Homo sapiens; identical to SEQ ID NO: 57259
  misc_feature: 680 for SV(C|O) and mtDNA

SEQ ID NO: 73515 - DNA, 120 bp, Homo sapiens
  misc_feature: 680 for SV(C|O) and mtDNA
gcatccatatagtcactccaggtttatggagggttcttctactattaggacttttcgcttcgaagcgaaggcttctcaaatcatgaaaattattaatattactgctgttagagaaatgaa

SEQ ID NO: 73516 - DNA, 120 bp, Homo sapiens
  misc_feature: 680 for SV(C|O) and mtDNA
ttatgttgtttatgcggggaaacgccatatcgggggcaccgattattaggggaactagtcagttgccaaagcctccgattatgatgggtattactatgaagaagattattacaaatgcat

SEQ ID NO: 73517 - DNA, 120 bp, Homo sapiens
  misc_feature: 680 for SV(C|O) and mtDNA
tcaacaatagggtttacgacctcgatgttggatcaggacatcccgatggtgcagccgctattaaaggttcgtttgttcaacgattaaagtcctacgtgatctgagttcagaccggagtaa

SEQ ID NO: 73518 - DNA, 120 bp, Homo sapiens
  misc_feature: 680 for SV(C|O) and mtDNA
ttaaaactaggcggctatggtataatacgcctcacactcattctcaaccccctgacaaaacacatagcctaccccttccttgtactatccctatgaggcataattataacaagctccatc

SEQ ID NO: 73519 - DNA, 120 bp, Homo sapiens
  misc_feature: 680 for SV(C|O) and mtDNA
tgtattatgcttggttataatttttcatctttcccttgcggtactatatctattgcgccaggtttcaatttctatcgcctatactttatttgggtaaatggtttggctaaggttgtctgg

SEQ ID NO: 73520 - DNA, 120 bp, Homo sapiens; identical to SEQ ID NO: 56692
  misc_feature: 680 for SV(C|O) and mtDNA

SEQ ID NO: 73521 - DNA, 120 bp, Homo sapiens
  misc_feature: 680 for SV(C|O) and mtDNA
acccccatactccttacactattcctcatcacccaactaaaaatattaaacacaaactaccacctacctccctcaccaaagcccataaaaataaaaaattataacaaaccctgagaacca

SEQ ID NO: 73522 - DNA, 120 bp, Homo sapiens
  misc_feature: 680 for SV(C|O) and mtDNA
tgccgcagtactcttaaaactaggcggctatggtataatacgcctcacactcattctcaaccccctgacaaaacacatagcctaccccttccttgtactatccctatgaggcataattat

SEQ ID NO: 73523 - DNA, 120 bp, Homo sapiens
  misc_feature: 680 for SV(C|O) and mtDNA
tgactgtaatgtgctatgtacggtaaatggctttatgtactatgtgctgttaagggtgagtaggtttgttggtatcctagtgggtgaggggtggctttggagttgcagttgatgtgtgat

SEQ ID NO: 73524 - DNA, 120 bp, Homo sapiens
  misc_feature: 680 for SV(C|O) and mtDNA
gacccagtaaaattgtaataagcagtgcttgaattatttggtttcggttgttttctattagactatggtgagctcaggtgattgatactcctgatgcgagtaatacggatgtgtttagga

SEQ ID NO: 73525 - DNA, 120 bp, Homo sapiens; identical to SEQ ID NO: 52287
  misc_feature: 680 for SV(C|O) and mtDNA

SEQ ID NO: 73526 - DNA, 120 bp, Homo sapiens; identical to SEQ ID NO: 59139
  misc_feature: 680 for SV(C|O) and mtDNA

SEQ ID NO: 73527 - DNA, 120 bp, Homo sapiens; identical to SEQ ID NO: 55346
  misc_feature: 680 for SV(C|O) and mtDNA

SEQ ID NO: 73528 - DNA, 120 bp, Homo sapiens
  misc_feature: 680 for SV(C|O) and mtDNA
tatatagtttaaacaaaacgaatgatttcgactcattaaattatgataatcatatttaccaaatgcccctcatttacataaatattatactagcatttaccatctcacttctaggaatac

SEQ ID NO: 73529 - DNA, 120 bp, Homo sapiens
  misc_feature: 680 for SV(C|O) and mtDNA
tagtataccgctcacacctcatatcctccctactatgcctagaaggaataatactatcactgttcattatagctactctcataaccctcaacacccactccctcttagccaatattgtgc

SEQ ID NO: 73530 - DNA, 120 bp, Homo sapiens
  misc_feature: 680 for SV(C|O) and mtDNA
gatagtggttcactggataagtggcgttggcttgccatgattgtgaggggtaggagtcaggtagttagtattaggaggggggttgttagggggtcggaggaaaaggttggggaacagcta

SEQ ID NO: 73531 - DNA, 120 bp, Homo sapiens
  misc_feature: 680 for SV(C|O) and mtDNA
tagcactcttgtgcgggatattgatttcacggaggatggtggtcaagggacccctatctgaggggggtcatccatggggacgagaagggatttgactgtaatgtgctatgtacggtaaat

SEQ ID NO: 73532 - DNA, 120 bp, Homo sapiens; identical to SEQ ID NO: 53040
  misc_feature: 680 for SV(C|O) and mtDNA

SEQ ID NO: 73533 - DNA, 120 bp, Homo sapiens
  misc_feature: 680 for SV(C|O) and mtDNA
tactctttcacccacagcaccaatcctacctccatcgctaaccccactaaaacactcaccaagacctcaacccctgacccccatgcctcaggatactcctcaatagccatcgctgtagta

SEQ ID NO: 73534 - DNA, 120 bp, Homo sapiens
  misc_feature: 680 for SV(C|O) and mtDNA
cactccagcctagcccctaccccccaattaggagggcactggcccccaacaggcatcaccccgctaaatcccctagaagtcccactcctaaacacatccgtattactcgcatcaggagta

SEQ ID NO: 73535 - DNA, 120 bp, Homo sapiens
  misc_feature: 680 for SV(C|O) and mtDNA
cttttcaccgtaggcggcctgactggcattgtattagcaaactcatcactagacatcgtactacacgacacgtactacgttgtagctcacttccactatgtcctatcaataggagctgta

SEQ ID NO: 73536 - DNA, 120 bp, Homo sapiens; identical to SEQ ID NO: 55890
  misc_feature: 680 for SV(C|O) and mtDNA

SEQ ID NO: 73537 - DNA, 120 bp, Homo sapiens
  misc_feature: 680 for SV(C|O) and mtDNA
gttaagaagaggaattgaacctctgactgtaaagttttaagttttatgcgattaccgggctctgccatcttaacaaaccctgttcttgggtgggtgtgggtataatactaagttgagatg

SEQ ID NO: 73538 - DNA, 120 bp, Homo sapiens
  misc_feature: 680 for SV(C|O) and mtDNA
gtgtatgcatcggggtagtccgagtaacgtcggggcattccggataggccgagaaagtgttgtgggaagaaagttagatttacgccgatgaatatgatagtgaaatggattttggcgtag

SEQ ID NO: 73539 - DNA, 120 bp, Homo sapiens
  misc_feature: 680 for SV(C|O) and mtDNA
gtagttgtatatagcctagaatttttcgttcggtaagcattaggaatgccattgcgattagaatgggtacaatgaggagtaggaggttggccatgggtatgttgttaagaagaggaattg

SEQ ID NO: 73540 - DNA, 120 bp, Homo sapiens; identical to SEQ ID NO: 57146
  misc_feature: 680 for SV(C|O) and mtDNA

SEQ ID NO: 73541 - DNA, 120 bp, Homo sapiens
  misc_feature: 680 for SV(C|O) and mtDNA
ggtatgggcccgatagcttatttagctgaccttactttaggatggggtgtgataggtggcacggagaattttggattctcagggatgggttcgattctcatagtcctagaaataaggggg

SEQ ID NO: 73542 - DNA, 120 bp, Homo sapiens
  misc_feature: 680 for SV(C|O) and mtDNA
ggtatatagtttaaacaaaacgaatgatttcgactcattaaattatgataatcatatttaccaaatgcccctcatttacataaatattatactagcatttaccatctcacttctaggaat

SEQ ID NO: 73543 - DNA, 120 bp, Homo sapiens
  misc_feature: 680 for SV(C|O) and mtDNA
gatgccaacacagcagccattcaagcaatcctatacaaccgtatcggcgatatcggtttcatcctcgccttagcatgatttatcctacactccaactcatgagacccacaacaaatagcc

SEQ ID NO: 73544 - DNA, 120 bp, Homo sapiens; identical to SEQ ID NO: 57048
  misc_feature: 680 for SV(C|O) and mtDNA

SEQ ID NO: 73545 - DNA, 120 bp, Homo sapiens
  misc_feature: 680 for SV(C|O) and mtDNA
acatagggtgctccggctccagcgtctcgcaatgctatcgcgtgcacaccccccagacgaaaataccaaatgcatggagagctcccgtgagtggttaatagggtgatagacctgtgatcc

SEQ ID NO: 73546 - DNA, 120 bp, Homo sapiens
  misc_feature: 680 for SV(C|O) and mtDNA
ctcttaaaactaggcggctatggtataatacgcctcacactcattctcaaccccctgacaaaacacatagcctaccccttccttgtactatccctatgaggcataattataacaagctcc

SEQ ID NO: 73547 - DNA, 120 bp, Homo sapiens
  misc_feature: 680 for SV(C|O) and mtDNA
gcttatgttgtttatgcggggaaacgccatatcgggggcaccgattattaggggaactagtcagttgccaaagcctccgattatgatgggtattactatgaagaagattattacaaatgc

SEQ ID NO: 73548 - DNA, 120 bp, Homo sapiens
  misc_feature: 680 for SV(C|O) and mtDNA
gaggatgtaagtccgtgggcgattatgagaatgactgcgccggtgaagcttcagggggtttggatgagaatggctgttactacgagggctatgtggctgattgaagagtatgcaatgagc

SEQ ID NO: 73549 - DNA, 120 bp, Homo sapiens
  misc_feature: 680 for SV(C|O) and mtDNA
gctatgtgttttgtcagggggttgagaatgagtgtgaggcgtattataccatagccgcctagttttaagagtactgcggcaagtactattgacccagcgatgggggcttcgacatgggct

SEQ ID NO: 73550 - DNA, 120 bp, Homo sapiens
  misc_feature: 680 for SV(C|O) and mtDNA
gccatccccttatgagcgggcgcagtgattataggctttcgctctaagattaaaaatgccctagcccacttcttaccacaaggcacacctacaccccttatccccatactagttattatc

SEQ ID NO: 73551 - DNA, 120 bp, Homo sapiens
  misc_feature: 680 for SV(C|O) and mtDNA
ccaccttcgacccttaagtttcataagggctatcgtagttttctggggtagaaaatgtagcccatttcttgccacctcatgggctacaccttgacctaacgtctttacgtgggtacttgc

SEQ ID NO: 73552 - DNA, 120 bp, Homo sapiens
  misc_feature: 680 for SV(C|O) and mtDNA
ccagctgacacaaaatagactacgaaagtggctttaacatatctgaacacacaatagctaagacccaaactgggattagataccccactatgcttagccctaaacctcaacagttaaatc

SEQ ID NO: 73553 - DNA, 120 bp, Homo sapiens
  misc_feature: 680 for SV(C|O) and mtDNA
aattttggtgcaactccaaataaaagtaacaaccatgcacactactataaccaccctaaccctgacttccctaattccccccatccttaccaccctcgttaaccctaacaaaaaaaactc

SEQ ID NO: 73554 - DNA, 120 bp, Homo sapiens; identical to SEQ ID NO: 57420
  misc_feature: 680 for SV(C|O) and mtDNA

SEQ ID NO: 73555 - DNA, 120 bp, Homo sapiens
  misc_feature: 680 for SV(C|O) and mtDNA
cccctaccccccaattaggagggcactggcccccaacaggcatcaccccgctaaatcccctagaagtcccactcctaaacacatccgtattactcgcatcaggagtatcaatcacctgag

SEQ ID NO: 73556 - DNA, 120 bp, Homo sapiens; identical to SEQ ID NO: 59177
  misc_feature: 680 for SV(C|O) and mtDNA

SEQ ID NO: 73557 - DNA, 120 bp, Homo sapiens
  misc_feature: 680 for SV(C|O) and mtDNA
cccagtaaaattgtaataagcagtgcttgaattatttggtttcggttgttttctattagactatggtgagctcaggtgattgatactcctgatgcgagtaatacggatgtgtttaggagt

SEQ ID NO: 73558 - DNA, 120 bp, Homo sapiens
  misc_feature: 680 for SV(C|O) and mtDNA
catccatatagtcactccaggtttatggagggttcttctactattaggacttttcgcttcgaagcgaaggcttctcaaatcatgaaaattattaatattactgctgttagagaaatgaat

SEQ ID NO: 73559 - DNA, 120 bp, Homo sapiens
  misc_feature: 680 for SV(C|O) and mtDNA
atgagcgattttaggtctgtttgtcgtaggcagatggagcttgttataattatgcctcatagggatagtacaaggaaggggtaggctatgtgttttgtcagggggttgagaatgagtgtg

SEQ ID NO: 73560 - DNA, 120 bp, Homo sapiens; identical to SEQ ID NO: 56155
  misc_feature: 680 for SV(C|O) and mtDNA

SEQ ID NO: 73561 - DNA, 120 bp, Homo sapiens
  misc_feature: 680 for SV(C|O) and mtDNA
aaaatccccactatgcacattttatttctccaacatactcggattctaccctaccatcacacaccgcacaatcccctatctaggccttcttacgagccaaaacctgcccctactcctcct

SEQ ID NO: 73562 - DNA, 120 bp, Homo sapiens
  misc_feature: 680 for SV(C|O) and mtDNA
accctattgttgatatggactctagaataggattgcgctgttatccctagggtaacttgttccgttggtcaagttattggatcaattgagtatagtagttcgctttgactggtgaagtct

SEQ ID NO: 73563 - DNA, 120 bp, Homo sapiens; identical to SEQ ID NO: 54752
  misc_feature: 680 for SV(C|O) and mtDNA

SEQ ID NO: 73564 - DNA, 120 bp, Homo sapiens
  misc_feature: 680 for SV(C|O) and mtDNA
acaacaatcctaatcctaataccaactatctccctaattgaaaacaaaatactcaaatgggcctgtccttgtagtataaactaatacaccagtcttgtaaaccggagatgaaaacctttt

SEQ ID NO: 73565 - DNA, 120 bp, Homo sapiens; identical to SEQ ID NO: 62385
  misc_feature: 679 for SV(C|O) and mtDNA

SEQ ID NO: 73566 - DNA, 120 bp, Homo sapiens; identical to SEQ ID NO: 58943
  misc_feature: 679 for SV(C|O) and mtDNA

SEQ ID NO: 73567 - DNA, 120 bp, Homo sapiens
  misc_feature: 679 for SV(C|O) and mtDNA
ggacactaggaaaaaaccttgtagagagagtaaaaaatttaacacccatagtaggcctaaaagcagccaccaattaagaaagcgttcaagctcaacacccactacctaaaaaatcccaaa

SEQ ID NO: 73568 - DNA, 120 bp, Homo sapiens
  misc_feature: 679 for SV(C|O) and mtDNA
tttcttttcaccgtaggcggcctgactggcattgtattagcaaactcatcactagacatcgtactacacgacacgtactacgttgtagctcacttccactatgtcctatcaataggagct

SEQ ID NO: 73569 - DNA, 120 bp, Homo sapiens; identical to SEQ ID NO: 58945
  misc_feature: 679 for SV(C|O) and mtDNA

SEQ ID NO: 73570 - DNA, 120 bp, Homo sapiens; identical to SEQ ID NO: 53847
  misc_feature: 679 for SV(C|O) and mtDNA

SEQ ID NO: 73571 - DNA, 120 bp, Homo sapiens
  misc_feature: 679 for SV(C|O) and mtDNA
ttggacactaggaaaaaaccttgtagagagagtaaaaaatttaacacccatagtaggcctaaaagcagccaccaattaagaaagcgttcaagctcaacacccactacctaaaaaatccca

SEQ ID NO: 73572 - DNA, 120 bp, Homo sapiens
  misc_feature: 679 for SV(C|O) and mtDNA
ttgagatgggggctagtttttgtcatgtgagaagaagcaggccggatgtcagaggggtgccttgggtaacctctgggacccagaagtgaaagggggctattcctagttttattgctatag

SEQ ID NO: 73573 - DNA, 120 bp, Homo sapiens; identical to SEQ ID NO: 57028
  misc_feature: 679 for SV(C|O) and mtDNA

SEQ ID NO: 73574 - DNA, 120 bp, Homo sapiens; identical to SEQ ID NO: 58649
  misc_feature: 679 for SV(C|O) and mtDNA

SEQ ID NO: 73575 - DNA, 120 bp, Homo sapiens
  misc_feature: 679 for SV(C|O) and mtDNA
ttattatgtcctacaagcattaattaattaacacactttagtaagtatgttcgtctgtaatattgaacgtaggtgcgataaataataggatgaggcaggaatcaaagacagatactgcga

SEQ ID NO: 73576 - DNA, 120 bp, Homo sapiens; identical to SEQ ID NO: 60938
  misc_feature: 679 for SV(C|O) and mtDNA

SEQ ID NO: 73577 - DNA, 120 bp, Homo sapiens; identical to SEQ ID NO: 53916
  misc_feature: 679 for SV(C|O) and mtDNA

SEQ ID NO: 73578 - DNA, 120 bp, Homo sapiens
  misc_feature: 679 for SV(C|O) and mtDNA
atagtggttcactggataagtggcgttggcttgccatgattgtgaggggtaggagtcaggtagttagtattaggaggggggttgttagggggtcggaggaaaaggttggggaacagctaa

SEQ ID NO: 73579 - DNA, 120 bp, Homo sapiens
  misc_feature: 679 for SV(C|O) and mtDNA
ccacattaacaacataaaaccctcattcacacgagaaaacaccctcatgttcatacacctatcccccattctcctcctatccctcaaccccgacatcattaccgggttttcctcttgtaa

SEQ ID NO: 73580 - DNA, 120 bp, Homo sapiens
  misc_feature: 679 for SV(C|O) and mtDNA
tgagatgggggctagtttttgtcatgtgagaagaagcaggccggatgtcagaggggtgccttgggtaacctctgggacccagaagtgaaagggggctattcctagttttattgctatagc

SEQ ID NO: 73581 - DNA, 120 bp, Homo sapiens
  misc_feature: 679 for SV(C|O) and mtDNA
ctcatgttcatacacctatcccccattctcctcctatccctcaaccccgacatcattaccgggttttcctcttgtaaatatagtttaaccaaaacatcagattgtgaatctgacaacaga

SEQ ID NO: 73582 - DNA, 120 bp, Homo sapiens
  misc_feature: 679 for SV(C|O) and mtDNA
tcatcgggtgatgatagccaaggtggggataagtgtggtttcgaagaagatataaaatatgattagttctgtggctgtgaatgttataattaaggagatttgtagggagattagtataga

SEQ ID NO: 73583 - DNA, 120 bp, Homo sapiens
  misc_feature: 679 for SV(C|O) and mtDNA
tcattcatttctctaacagcagtaatattaataattttcatgatttgagaagccttcgcttcgaagcgaaaagtcctaatagtagaagaaccctccataaacctggagtgactatatgga

SEQ ID NO: 73584 - DNA, 120 bp, Homo sapiens
  misc_feature: 679 for SV(C|O) and mtDNA
tccagctgacacaaaatagactacgaaagtggctttaacatatctgaacacacaatagctaagacccaaactgggattagataccccactatgcttagccctaaacctcaacagttaaat

SEQ ID NO: 73585 - DNA, 120 bp, Homo sapiens
  misc_feature: 679 for SV(C|O) and mtDNA
ggaaaaggttggggaacagctaaataggttgttgttgatttggttaaaaaatagtagagggatgatgctaataattaggctgtgggtggttgtgttgattcaaattatgtgttttttgga

SEQ ID NO: 73586 - DNA, 120 bp, Homo sapiens
  misc_feature: 679 for SV(C|O) and mtDNA
aaggacaaatcagagaaaaagtctttaactccaccattagcacccaaagctaagattctaatttaaactattctctgttctttcatggggaagcagatttgggtgccacccaagtattga

SEQ ID NO: 73587 - DNA, 120 bp, Homo sapiens
  misc_feature: 679 for SV(C|O) and mtDNA
caaaccacgtctacaaaatgccagtatcaggcggcggcttcgaagccaaagtgatgtttggatgtaaagtgaaatattagttggcggatgaagcagatagtgaggaaagttgagccaata

SEQ ID NO: 73588 - DNA, 120 bp, Homo sapiens; identical to SEQ ID NO: 55594
  misc_feature: 679 for SV(C|O) and mtDNA

SEQ ID NO: 73589 - DNA, 120 bp, Homo sapiens
  misc_feature: 679 for SV(C|O) and mtDNA
gccgcagtactcttaaaactaggcggctatggtataatacgcctcacactcattctcaaccccctgacaaaacacatagcctaccccttccttgtactatccctatgaggcataattata

SEQ ID NO: 73590 - DNA, 120 bp, Homo sapiens
  misc_feature: 679 for SV(C|O) and mtDNA
tagagaggtagagtttttttcgtgatagtggttcactggataagtggcgttggcttgccatgattgtgaggggtaggagtcaggtagttagtattaggaggggggttgttagggggtcgg

SEQ ID NO: 73591 - DNA, 120 bp, Homo sapiens
  misc_feature: 679 for SV(C|O) and mtDNA
tactcttaaaactaggcggctatggtataatacgcctcacactcattctcaaccccctgacaaaacacatagcctaccccttccttgtactatccctatgaggcataattataacaagct

SEQ ID NO: 73592 - DNA, 120 bp, Homo sapiens; identical to SEQ ID NO: 53017
  misc_feature: 679 for SV(C|O) and mtDNA

SEQ ID NO: 73593 - DNA, 120 bp, Homo sapiens
  misc_feature: 679 for SV(C|O) and mtDNA
cttaacacaaagcacccaacttacacttaggagatttcaacttaacttgaccgctctgagctaaacctagccccaaacccactccaccttactaccagacaaccttagccaaaccattta

SEQ ID NO: 73594 - DNA, 120 bp, Homo sapiens; identical to SEQ ID NO: 61614
  misc_feature: 679 for SV(C|O) and mtDNA

SEQ ID NO: 73595 - DNA, 120 bp, Homo sapiens
  misc_feature: 679 for SV(C|O) and mtDNA
gtcgtaggcagatggagcttgttataattatgcctcatagggatagtacaaggaaggggtaggctatgtgttttgtcagggggttgagaatgagtgtgaggcgtattataccatagccgc

SEQ ID NO: 73596 - DNA, 120 bp, Homo sapiens
  misc_feature: 679 for SV(C|O) and mtDNA
gtattatacccacacccacccaagaacagggtttgttaagatggcagagcccggtaatcgcataaaacttaaaactttacagtcagaggttcaattcctcttcttaacaacatacccatg

SEQ ID NO: 73597 - DNA, 120 bp, Homo sapiens
  misc_feature: 679 for SV(C|O) and mtDNA
gtatgcaatgagcgattttaggtctgtttgtcgtaggcagatggagcttgttataattatgcctcatagggatagtacaaggaaggggtaggctatgtgttttgtcagggggttgagaat

SEQ ID NO: 73598 - DNA, 120 bp, Homo sapiens
  misc_feature: 679 for SV(C|O) and mtDNA
gtagcaggaatcttcttactcatccgcttccaccccctagcagaaaatagcccactaatccaaactctaacactatgcttaggcgctatcaccactctgttcgcagcagtctgcgccctt

SEQ ID NO: 73599 - DNA, 120 bp, Homo sapiens
  misc_feature: 679 for SV(C|O) and mtDNA
acccacacccacccaagaacagggtttgttaagatggcagagcccggtaatcgcataaaacttaaaactttacagtcagaggttcaattcctcttcttaacaacatacccatggccaacc

SEQ ID NO: 73600 - DNA, 120 bp, Homo sapiens
  misc_feature: 679 for SV(C|O) and mtDNA
ggggctagtttttgtcatgtgagaagaagcaggccggatgtcagaggggtgccttgggtaacctctgggacccagaagtgaaagggggctattcctagttttattgctatagccattatg

SEQ ID NO: 73601 - DNA, 120 bp, Homo sapiens
  misc_feature: 679 for SV(C|O) and mtDNA
gcccatttcttgccacctcatgggctacaccttgacctaacgtctttacgtgggtacttgcgcttactttgtagccttcatcagggtttgctgaagatggcggtatataggctgagcaag

SEQ ID NO: 73602 - DNA, 120 bp, Homo sapiens; identical to SEQ ID NO: 59051
  misc_feature: 679 for SV(C|O) and mtDNA

SEQ ID NO: 73603 - DNA, 120 bp, Homo sapiens; identical to SEQ ID NO: 55711
  misc_feature: 679 for SV(C|O) and mtDNA

SEQ ID NO: 73604 - DNA, 120 bp, Homo sapiens
  misc_feature: 679 for SV(C|O) and mtDNA
ccgatagcttatttagctgaccttactttaggatggggtgtgataggtggcacggagaattttggattctcagggatgggttcgattctcatagtcctagaaataagggggtttaagctc

SEQ ID NO: 73605 - DNA, 120 bp, Homo sapiens; identical to SEQ ID NO: 52396
  misc_feature: 679 for SV(C|O) and mtDNA

SEQ ID NO: 73606 - DNA, 120 bp, Homo sapiens
  misc_feature: 679 for SV(C|O) and mtDNA
gaatgctggagattgtaatgggtatggagacatatcatataagtaatgctagggtgagtggtaggaagttttttcataggaggtgtatgagttggtcgtagcggaatcgggggtatgctg

SEQ ID NO: 73607 - DNA, 120 bp, Homo sapiens
  misc_feature: 679 for SV(C|O) and mtDNA
gaagatttataggtagaggcgacaaacctaccgagcctggtgatagctggttgtccaagatagaatcttagttcaactttaaatttgcccacagaaccctctaaatccccttgtaaattt

SEQ ID NO: 73608 - DNA, 120 bp, Homo sapiens; identical to SEQ ID NO: 56552
  misc_feature: 679 for SV(C|O) and mtDNA

SEQ ID NO: 73609 - DNA, 120 bp, Homo sapiens
  misc_feature: 679 for SV(C|O) and mtDNA
cctcatgttcatacacctatcccccattctcctcctatccctcaaccccgacatcattaccgggttttcctcttgtaaatatagtttaaccaaaacatcagattgtgaatctgacaacag

SEQ ID NO: 73610 - DNA, 120 bp, Homo sapiens
  misc_feature: 679 for SV(C|O) and mtDNA
acccagtaaaattgtaataagcagtgcttgaattatttggtttcggttgttttctattagactatggtgagctcaggtgattgatactcctgatgcgagtaatacggatgtgtttaggag

SEQ ID NO: 73611 - DNA, 120 bp, Homo sapiens; identical to SEQ ID NO: 55203
  misc_feature: 679 for SV(C|O) and mtDNA

SEQ ID NO: 73612 - DNA, 120 bp, Homo sapiens
  misc_feature: 679 for SV(C|O) and mtDNA
ctagtataccgctcacacctcatatcctccctactatgcctagaaggaataatactatcactgttcattatagctactctcataaccctcaacacccactccctcttagccaatattgtg

SEQ ID NO: 73613 - DNA, 120 bp, Homo sapiens
  misc_feature: 679 for SV(C|O) and mtDNA
aattcctcttcttaacaacatacccatggccaacctcctactcctcattgtacccattctaatcgcaatggcattcctaatgcttaccgaacgaaaaattctaggctatatacaactacg

SEQ ID NO: 73614 - DNA, 120 bp, Homo sapiens
  misc_feature: 679 for SV(C|O) and mtDNA
cgattttaggtctgtttgtcgtaggcagatggagcttgttataattatgcctcatagggatagtacaaggaaggggtaggctatgtgttttgtcagggggttgagaatgagtgtgaggcg

SEQ ID NO: 73615 - DNA, 120 bp, Homo sapiens
  misc_feature: 679 for SV(C|O) and mtDNA
cattaaccttttaagttaaagattaagagaaccaacacctctttacagtgaaatgccccaactaaatactaccgtatggcccaccataattacccccatactccttacactattcctcat

SEQ ID NO: 73616 - DNA, 120 bp, Homo sapiens; identical to SEQ ID NO: 58938
  misc_feature: 679 for SV(C|O) and mtDNA

SEQ ID NO: 73617 - DNA, 120 bp, Homo sapiens; identical to SEQ ID NO: 58872
  misc_feature: 679 for SV(C|O) and mtDNA

SEQ ID NO: 73618 - DNA, 120 bp, Homo sapiens
  misc_feature: 679 for SV(C|O) and mtDNA
acttgccgcagtactcttaaaactaggcggctatggtataatacgcctcacactcattctcaaccccctgacaaaacacatagcctaccccttccttgtactatccctatgaggcataat

SEQ ID NO: 73619 - DNA, 120 bp, Homo sapiens; identical to SEQ ID NO: 61692
  misc_feature: 679 for SV(C|O) and mtDNA

SEQ ID NO: 73620 - DNA, 120 bp, Homo sapiens; identical to SEQ ID NO: 56093
  misc_feature: 679 for SV(C|O) and mtDNA

SEQ ID NO: 73621 - DNA, 120 bp, Homo sapiens
  misc_feature: 679 for SV(C|O) and mtDNA
atgggcccgatagcttatttagctgaccttactttaggatggggtgtgataggtggcacggagaattttggattctcagggatgggttcgattctcatagtcctagaaataagggggttt

SEQ ID NO: 73622 - DNA, 120 bp, Homo sapiens
  misc_feature: 679 for SV(C|O) and mtDNA
agtattgcaacttactgagggctttgaaggctcttggtctgtatttaacctaaatttctataagattattagtataaaaggggagataggtaggagtagcgtggtaagggcgatgagtgt

SEQ ID NO: 73623 - DNA, 120 bp, Homo sapiens
  misc_feature: 679 for SV(C|O) and mtDNA
aatgccctagcccacttcttaccacaaggcacacctacaccccttatccccatactagttattatcgaaaccatcagcctactcattcaaccaatagccctggccgtacgcctaaccgct

SEQ ID NO: 73624 - DNA, 120 bp, Homo sapiens
  misc_feature: 678 for SV(C|O) and mtDNA
ataggcctcgcccgatgtgtaggaagaggcagataaagaatattgaggcgccattggcgtgaaggtagcggatgattcagccataatttacgtctcgagtgatgtgggcgattgatgaaa

SEQ ID NO: 73625 - DNA, 120 bp, Homo sapiens; identical to SEQ ID NO: 54657
  misc_feature: 678 for SV(C|O) and mtDNA

SEQ ID NO: 73626 - DNA, 120 bp, Homo sapiens; identical to SEQ ID NO: 59214
  misc_feature: 678 for SV(C|O) and mtDNA

SEQ ID NO: 73627 - DNA, 120 bp, Homo sapiens
  misc_feature: 678 for SV(C|O) and mtDNA
catagggtgctccggctccagcgtctcgcaatgctatcgcgtgcacaccccccagacgaaaataccaaatgcatggagagctcccgtgagtggttaatagggtgatagacctgtgatcca

SEQ ID NO: 73628 - DNA, 120 bp, Homo sapiens; identical to SEQ ID NO: 56509
  misc_feature: 678 for SV(C|O) and mtDNA

SEQ ID NO: 73629 - DNA, 120 bp, Homo sapiens; identical to SEQ ID NO: 56661
  misc_feature: 678 for SV(C|O) and mtDNA

SEQ ID NO: 73630 - DNA, 120 bp, Homo sapiens
  misc_feature: 678 for SV(C|O) and mtDNA
gcctagcccctaccccccaattaggagggcactggcccccaacaggcatcaccccgctaaatcccctagaagtcccactcctaaacacatccgtattactcgcatcaggagtatcaatca

SEQ ID NO: 73631 - DNA, 120 bp, Homo sapiens; identical to SEQ ID NO: 61545
  misc_feature: 678 for SV(C|O) and mtDNA

SEQ ID NO: 73632 - DNA, 120 bp, Homo sapiens; identical to SEQ ID NO: 61239
  misc_feature: 678 for SV(C|O) and mtDNA

SEQ ID NO: 73633 - DNA, 120 bp, Homo sapiens
  misc_feature: 678 for SV(C|O) and mtDNA
gctgttatccctagggtaacttgttccgttggtcaagttattggatcaattgagtatagtagttcgctttgactggtgaagtcttagcatgtactgctcggaggttgggttctgctccga

SEQ ID NO: 73634 - DNA, 120 bp, Homo sapiens; identical to SEQ ID NO: 55317
  misc_feature: 678 for SV(C|O) and mtDNA

SEQ ID NO: 73635 - DNA, 120 bp, Homo sapiens
  misc_feature: 678 for SV(C|O) and mtDNA
gggcctagccctactagtctcaatctccaacacatatggcctagactacgtacataacctaaacctactccaatgctaaaactaatcgtcccaacaattatattactaccactgacatga

SEQ ID NO: 73636 - DNA, 120 bp, Homo sapiens
  misc_feature: 678 for SV(C|O) and mtDNA
tcataagtggagtccgtaaagaggtatctttactataaaagctattgtgtaagctagtcatattaagttgttggctcaggagtttgatagttcttgggcagtgagagtgagtagtagaat

SEQ ID NO: 73637 - DNA, 120 bp, Homo sapiens; identical to SEQ ID NO: 57690
  misc_feature: 678 for SV(C|O) and mtDNA

SEQ ID NO: 73638 - DNA, 120 bp, Homo sapiens
  misc_feature: 678 for SV(C|O) and mtDNA
aagagtatgcaatgagcgattttaggtctgtttgtcgtaggcagatggagcttgttataattatgcctcatagggatagtacaaggaaggggtaggctatgtgttttgtcagggggttga

SEQ ID NO: 73639 - DNA, 120 bp, Homo sapiens; identical to SEQ ID NO: 61627
  misc_feature: 678 for SV(C|O) and mtDNA

SEQ ID NO: 73640 - DNA, 120 bp, Homo sapiens
  misc_feature: 678 for SV(C|O) and mtDNA
tagtattagttagttttgttgtgagtgttaggaaaagggcatacaggactaggaagcagataaggaaaatgattatgagggcgtgatcatgaaaggtgataagctcttctatgatagggg

SEQ ID NO: 73641 - DNA, 120 bp, Homo sapiens; identical to SEQ ID NO: 55094
  misc_feature: 678 for SV(C|O) and mtDNA

SEQ ID NO: 73642 - DNA, 120 bp, Homo sapiens; identical to SEQ ID NO: 56055
  misc_feature: 678 for SV(C|O) and mtDNA

SEQ ID NO: 73643 - DNA, 120 bp, Homo sapiens
  misc_feature: 678 for SV(C|O) and mtDNA
gtatgggcccgatagcttatttagctgaccttactttaggatggggtgtgataggtggcacggagaattttggattctcagggatgggttcgattctcatagtcctagaaataagggggt

SEQ ID NO: 73644 - DNA, 120 bp, Homo sapiens
  misc_feature: 678 for SV(C|O) and mtDNA
aaattataaccaagcataatacagcaaggactaacccctataccttctgcataatgaattaactagaaataactttgcaaggagagccaaagctaagacccccgaaaccagacgagctac

SEQ ID NO: 73645 - DNA, 120 bp, Homo sapiens
  misc_feature: 678 for SV(C|O) and mtDNA
ccctcttagccaatattgtgcctattgccatactagtctttgccgcctgcgaagcagcggtgggcctagccctactagtctcaatctccaacacatatggcctagactacgtacataacc

SEQ ID NO: 73646 - DNA, 120 bp, Homo sapiens; identical to SEQ ID NO: 54890
  misc_feature: 678 for SV(C|O) and mtDNA

SEQ ID NO: 73647 - DNA, 120 bp, Homo sapiens
  misc_feature: 678 for SV(C|O) and mtDNA
ggcccgatagcttatttagctgaccttactttaggatggggtgtgataggtggcacggagaattttggattctcagggatgggttcgattctcatagtcctagaaataagggggtttaag

SEQ ID NO: 73648 - DNA, 120 bp, Homo sapiens; identical to SEQ ID NO: 54737
  misc_feature: 678 for SV(C|O) and mtDNA

SEQ ID NO: 73649 - DNA, 120 bp, Homo sapiens
  misc_feature: 678 for SV(C|O) and mtDNA
ccattgcgattagaatgggtacaatgaggagtaggaggttggccatgggtatgttgttaagaagaggaattgaacctctgactgtaaagttttaagttttatgcgattaccgggctctgc

SEQ ID NO: 73650 - DNA, 120 bp, Homo sapiens; identical to SEQ ID NO: 58929
  misc_feature: 678 for SV(C|O) and mtDNA

SEQ ID NO: 73651 - DNA, 120 bp, Homo sapiens
  misc_feature: 678 for SV(C|O) and mtDNA
gagacccagtaaaattgtaataagcagtgcttgaattatttggtttcggttgttttctattagactatggtgagctcaggtgattgatactcctgatgcgagtaatacggatgtgtttag

SEQ ID NO: 73652 - DNA, 120 bp, Homo sapiens; identical to SEQ ID NO: 58119
  misc_feature: 678 for SV(C|O) and mtDNA

SEQ ID NO: 73653 - DNA, 120 bp, Homo sapiens
  misc_feature: 678 for SV(C|O) and mtDNA
accctccataaacctggagtgactatatggatgccccccaccctaccacacattcgaagaacccgtatacataaaatctagacaaaaaaggaaggaatcgaaccccccaaagctggtttc

SEQ ID NO: 73654 - DNA, 120 bp, Homo sapiens
  misc_feature: 678 for SV(C|O) and mtDNA
agtactcttaaaactaggcggctatggtataatacgcctcacactcattctcaaccccctgacaaaacacatagcctaccccttccttgtactatccctatgaggcataattataacaag

SEQ ID NO: 73655 - DNA, 120 bp, Homo sapiens; identical to SEQ ID NO: 53206
  misc_feature: 678 for SV(C|O) and mtDNA

SEQ ID NO: 73656 - DNA, 120 bp, Homo sapiens; identical to SEQ ID NO: 52862
  misc_feature: 678 for SV(C|O) and mtDNA

SEQ ID NO: 73657 - DNA, 120 bp, Homo sapiens; identical to SEQ ID NO: 52398
  misc_feature: 678 for SV(C|O) and mtDNA

SEQ ID NO: 73658 - DNA, 120 bp, Homo sapiens
  misc_feature: 678 for SV(C|O) and mtDNA
aatagtacttgccgcagtactcttaaaactaggcggctatggtataatacgcctcacactcattctcaaccccctgacaaaacacatagcctaccccttccttgtactatccctatgagg

SEQ ID NO: 73659 - DNA, 120 bp, Homo sapiens; identical to SEQ ID NO: 61604
  misc_feature: 678 for SV(C|O) and mtDNA

SEQ ID NO: 73660 - DNA, 120 bp, Homo sapiens
  misc_feature: 678 for SV(C|O) and mtDNA
catttaccgtacatagcacattacagtcaaatcccttctcgtccccatggatgacccccctcagataggggtcccttgaccaccatcctccgtgaaatcaatatcccgcacaagagtgct

SEQ ID NO: 73661 - DNA, 120 bp, Homo sapiens
  misc_feature: 678 for SV(C|O) and mtDNA
atactcttcaatcagccacatagccctcgtagtaacagccattctcatccaaaccccctgaagcttcaccggcgcagtcattctcataatcgcccacggacttacatcctcattactatt

SEQ ID NO: 73662 - DNA, 120 bp, Homo sapiens; identical to SEQ ID NO: 52749
  misc_feature: 678 for SV(C|O) and mtDNA

SEQ ID NO: 73663 - DNA, 120 bp, Homo sapiens
  misc_feature: 678 for SV(C|O) and mtDNA
aatgctggagattgtaatgggtatggagacatatcatataagtaatgctagggtgagtggtaggaagttttttcataggaggtgtatgagttggtcgtagcggaatcgggggtatgctgt

SEQ ID NO: 73664 - DNA, 120 bp, Homo sapiens
  misc_feature: 678 for SV(C|O) and mtDNA
aatgagcgattttaggtctgtttgtcgtaggcagatggagcttgttataattatgcctcatagggatagtacaaggaaggggtaggctatgtgttttgtcagggggttgagaatgagtgt

SEQ ID NO: 73665 - DNA, 120 bp, Homo sapiens
  misc_feature: 677 for SV(C|O) and mtDNA
tttcaccgtaggcggcctgactggcattgtattagcaaactcatcactagacatcgtactacacgacacgtactacgttgtagctcacttccactatgtcctatcaataggagctgtatt

SEQ ID NO: 73666 - DNA, 120 bp, Homo sapiens
  misc_feature: 677 for SV(C|O) and mtDNA
tgggaagatttataggtagaggcgacaaacctaccgagcctggtgatagctggttgtccaagatagaatcttagttcaactttaaatttgcccacagaaccctctaaatccccttgtaaa

SEQ ID NO: 73667 - DNA, 120 bp, Homo sapiens; identical to SEQ ID NO: 53105
  misc_feature: 677 for SV(C|O) and mtDNA

SEQ ID NO: 73668 - DNA, 120 bp, Homo sapiens
  misc_feature: 677 for SV(C|O) and mtDNA
tggtgatttggaggatcaggcaggcgccaaggagtgagccgaagtttcatcatgcggagatgttggatggggtggggaggtcgatgaatgagtggttaattaattttattagggggttaa

SEQ ID NO: 73669 - DNA, 120 bp, Homo sapiens
  misc_feature: 677 for SV(C|O) and mtDNA
tgtcgtaggcagatggagcttgttataattatgcctcatagggatagtacaaggaaggggtaggctatgtgttttgtcagggggttgagaatgagtgtgaggcgtattataccatagccg

SEQ ID NO: 73670 - DNA, 120 bp, Homo sapiens
  misc_feature: 677 for SV(C|O) and mtDNA
tgtagcaggaatcttcttactcatccgcttccaccccctagcagaaaatagcccactaatccaaactctaacactatgcttaggcgctatcaccactctgttcgcagcagtctgcgccct

SEQ ID NO: 73671 - DNA, 120 bp, Homo sapiens
  misc_feature: 677 for SV(C|O) and mtDNA
accaatgatatgaaaaaccatcgttgtatttcaactacaagaacaccaatgaccccaatacgcaaaattaaccccctaataaaattaattaaccactcattcatcgacctccccacccca

SEQ ID NO: 73672 - DNA, 120 bp, Homo sapiens
  misc_feature: 677 for SV(C|O) and mtDNA
tgctggagattgtaatgggtatggagacatatcatataagtaatgctagggtgagtggtaggaagttttttcataggaggtgtatgagttggtcgtagcggaatcgggggtatgctgttc

SEQ ID NO: 73673 - DNA, 120 bp, Homo sapiens
  misc_feature: 677 for SV(C|O) and mtDNA
tgctatagccattatgattattaatgatgagtattgattggtagtattggttatggttcattgtccggagagtatattgttgaagaggatagctattagaaggattatggatgcggttgc

SEQ ID NO: 73674 - DNA, 120 bp, Homo sapiens
  misc_feature: 677 for SV(C|O) and mtDNA
aacatctccgcatgatgaaacttcggctcactccttggcgcctgcctgatcctccaaatcaccacaggactattcctagccatgcactactcaccagacgcctcaaccgccttttcatca

SEQ ID NO: 73675 - DNA, 120 bp, Homo sapiens; identical to SEQ ID NO: 55742
  misc_feature: 677 for SV(C|O) and mtDNA

SEQ ID NO: 73676 - DNA, 120 bp, Homo sapiens
  misc_feature: 677 for SV(C|O) and mtDNA
tctagcatcaccagtattagaggcaccgcctgcccagtgacacatgtttaacggccgcggtaccctaaccgtgcaaaggtagcataatcacttgttccttaaatagggacctgtatgaat

SEQ ID NO: 73677 - DNA, 120 bp, Homo sapiens; identical to SEQ ID NO: 57073
  misc_feature: 677 for SV(C|O) and mtDNA

SEQ ID NO: 73678 - DNA, 120 bp, Homo sapiens
  misc_feature: 677 for SV(C|O) and mtDNA
atctttcttttcaccgtaggcggcctgactggcattgtattagcaaactcatcactagacatcgtactacacgacacgtactacgttgtagctcacttccactatgtcctatcaatagga

SEQ ID NO: 73679 - DNA, 120 bp, Homo sapiens
  misc_feature: 677 for SV(C|O) and mtDNA
tccaccttcgacccttaagtttcataagggctatcgtagttttctggggtagaaaatgtagcccatttcttgccacctcatgggctacaccttgacctaacgtctttacgtgggtacttg

SEQ ID NO: 73680 - DNA, 120 bp, Homo sapiens
  misc_feature: 677 for SV(C|O) and mtDNA
tcatgcccgcctcttcacgggcaggtcaatttcactggttaaaagtaagagacagctgaaccctcgtggagccattcatacaggtccctatttaaggaacaagtgattatgctacctttg

SEQ ID NO: 73681 - DNA, 120 bp, Homo sapiens
  misc_feature: 677 for SV(C|O) and mtDNA
tcacaacaatcctaatcctaataccaactatctccctaattgaaaacaaaatactcaaatgggcctgtccttgtagtataaactaatacaccagtcttgtaaaccggagatgaaaacctt

SEQ ID NO: 73682 - DNA, 120 bp, Homo sapiens
  misc_feature: 677 for SV(C|O) and mtDNA
tatgcaatgagcgattttaggtctgtttgtcgtaggcagatggagcttgttataattatgcctcatagggatagtacaaggaaggggtaggctatgtgttttgtcagggggttgagaatg

SEQ ID NO: 73683 - DNA, 120 bp, Homo sapiens; identical to SEQ ID NO: 60572
  misc_feature: 677 for SV(C|O) and mtDNA

SEQ ID NO: 73684 - DNA, 120 bp, Homo sapiens
  misc_feature: 677 for SV(C|O) and mtDNA
tagtctaggccatatgtgttggagattgagactagtagggctaggcccaccgctgcttcgcaggcggcaaagactagtatggcaataggcacaatattggctaagagggagtgggtgttg

SEQ ID NO: 73685 - DNA, 120 bp, Homo sapiens
  misc_feature: 677 for SV(C|O) and mtDNA
ccacctcaatcacactactccccatatctaacaacgtaaaaataaaatgacagtttgaacatacaaaacccaccccattcctccccacactcatcgcccttaccacgctactcctaccta

SEQ ID NO: 73686 - DNA, 120 bp, Homo sapiens; identical to SEQ ID NO: 55215
  misc_feature: 677 for SV(C|O) and mtDNA

SEQ ID NO: 73687 - DNA, 120 bp, Homo sapiens
  misc_feature: 677 for SV(C|O) and mtDNA
cttcgaagcgaaggcttctcaaatcatgaaaattattaatattactgctgttagagaaatgaatgagcctacagatgataggatgtttcatgtggtgtatgcatcggggtagtccgagta

SEQ ID NO: 73688 - DNA, 120 bp, Homo sapiens
  misc_feature: 677 for SV(C|O) and mtDNA
tacccccatactccttacactattcctcatcacccaactaaaaatattaaacacaaactaccacctacctccctcaccaaagcccataaaaataaaaaattataacaaaccctgagaacc

SEQ ID NO: 73689 - DNA, 120 bp, Homo sapiens
  misc_feature: 677 for SV(C|O) and mtDNA
taacacaaagcacccaacttacacttaggagatttcaacttaacttgaccgctctgagctaaacctagccccaaacccactccaccttactaccagacaaccttagccaaaccatttacc

SEQ ID NO: 73690 - DNA, 120 bp, Homo sapiens; identical to SEQ ID NO: 54063
  misc_feature: 677 for SV(C|O) and mtDNA

SEQ ID NO: 73691 - DNA, 120 bp, Homo sapiens; identical to SEQ ID NO: 52821
  misc_feature: 677 for SV(C|O) and mtDNA

SEQ ID NO: 73692 - DNA, 120 bp, Homo sapiens
  misc_feature: 677 for SV(C|O) and mtDNA
gtggggtatctaatcccagtttgggtcttagctattgtgtgttcagatatgttaaagccactttcgtagtctattttgtgtcagctggagttttttacaactcaggtgagttttagcttt

SEQ ID NO: 73693 - DNA, 120 bp, Homo sapiens; identical to SEQ ID NO: 55750
  misc_feature: 677 for SV(C|O) and mtDNA

SEQ ID NO: 73694 - DNA, 120 bp, Homo sapiens
  misc_feature: 677 for SV(C|O) and mtDNA
ggtcgtaaaccctattgttgatatggactctagaataggattgcgctgttatccctagggtaacttgttccgttggtcaagttattggatcaattgagtatagtagttcgctttgactgg

SEQ ID NO: 73695 - DNA, 120 bp, Homo sapiens
  misc_feature: 677 for SV(C|O) and mtDNA
ccccttccaaacaacaatccccctctacctaaaactcacagccctcgctgtcactttcctaggacttctaacagccctagacctcaactacctaaccaacaaacttaaaataaaatcccc

SEQ ID NO: 73696 - DNA, 120 bp, Homo sapiens; identical to SEQ ID NO: 52923
  misc_feature: 677 for SV(C|O) and mtDNA

SEQ ID NO: 73697 - DNA, 120 bp, Homo sapiens
  misc_feature: 677 for SV(C|O) and mtDNA
gagatgggggctagtttttgtcatgtgagaagaagcaggccggatgtcagaggggtgccttgggtaacctctgggacccagaagtgaaagggggctattcctagttttattgctatagcc

SEQ ID NO: 73698 - DNA, 120 bp, Homo sapiens
  misc_feature: 677 for SV(C|O) and mtDNA
ctttcttttcaccgtaggcggcctgactggcattgtattagcaaactcatcactagacatcgtactacacgacacgtactacgttgtagctcacttccactatgtcctatcaataggagc

SEQ ID NO: 73699 - DNA, 120 bp, Homo sapiens
  misc_feature: 677 for SV(C|O) and mtDNA
agagcttatcacctttcatgatcacgccctcataatcattttccttatctgcttcctagtcctgtatgcccttttcctaacactcacaacaaaactaactaatactaacatctcagacgc

SEQ ID NO: 73700 - DNA, 120 bp, Homo sapiens
  misc_feature: 677 for SV(C|O) and mtDNA
attcctcttcttaacaacatacccatggccaacctcctactcctcattgtacccattctaatcgcaatggcattcctaatgcttaccgaacgaaaaattctaggctatatacaactacgc

SEQ ID NO: 73701 - DNA, 120 bp, Homo sapiens; identical to SEQ ID NO: 56129
  misc_feature: 677 for SV(C|O) and mtDNA

SEQ ID NO: 73702 - DNA, 120 bp, Homo sapiens
  misc_feature: 677 for SV(C|O) and mtDNA
ctccagcctagcccctaccccccaattaggagggcactggcccccaacaggcatcaccccgctaaatcccctagaagtcccactcctaaacacatccgtattactcgcatcaggagtatc

SEQ ID NO: 73703 - DNA, 120 bp, Homo sapiens
  misc_feature: 677 for SV(C|O) and mtDNA
atgccattgcgattagaatgggtacaatgaggagtaggaggttggccatgggtatgttgttaagaagaggaattgaacctctgactgtaaagttttaagttttatgcgattaccgggctc

SEQ ID NO: 73704 - DNA, 120 bp, Homo sapiens
  misc_feature: 677 for SV(C|O) and mtDNA
aagagcttatcacctttcatgatcacgccctcataatcattttccttatctgcttcctagtcctgtatgcccttttcctaacactcacaacaaaactaactaatactaacatctcagacg

SEQ ID NO: 73705 - DNA, 120 bp, Homo sapiens
  misc_feature: 677 for SV(C|O) and mtDNA
ccatccccttatgagcgggcgcagtgattataggctttcgctctaagattaaaaatgccctagcccacttcttaccacaaggcacacctacaccccttatccccatactagttattatcg

SEQ ID NO: 73706 - DNA, 120 bp, Homo sapiens
  misc_feature: 677 for SV(C|O) and mtDNA
attggtatatagtttaaacaaaacgaatgatttcgactcattaaattatgataatcatatttaccaaatgcccctcatttacataaatattatactagcatttaccatctcacttctagg

SEQ ID NO: 73707 - DNA, 120 bp, Homo sapiens
  misc_feature: 677 for SV(C|O) and mtDNA
ccgtcggaaatggtgaagggagactcgaagtactctgaggcttgtaggagggtaaaatagagacccagtaaaattgtaataagcagtgcttgaattatttggtttcggttgttttctatt

SEQ ID NO: 73708 - DNA, 120 bp, Homo sapiens
  misc_feature: 677 for SV(C|O) and mtDNA
caaattcctccctgtacgaaaggacaagagaaataaggcctacttcacaaagcgccttcccccgtaaatgatatcatctcaacttagtattatacccacacccacccaagaacagggttt

SEQ ID NO: 73709 - DNA, 120 bp, Homo sapiens
  misc_feature: 677 for SV(C|O) and mtDNA
attcttcttagtagctattaccttcttattatttgatctagaaattgccctccttttacccctaccatgagccctacaaacaactaacctaccactaatagttatgtcatccctcttatt

SEQ ID NO: 73710 - DNA, 120 bp, Homo sapiens
  misc_feature: 677 for SV(C|O) and mtDNA
agtacttgccgcagtactcttaaaactaggcggctatggtataatacgcctcacactcattctcaaccccctgacaaaacacatagcctaccccttccttgtactatccctatgaggcat

SEQ ID NO: 73711 - DNA, 120 bp, Homo sapiens
  misc_feature: 677 for SV(C|O) and mtDNA
aaatcccttctcgtccccatggatgacccccctcagataggggtcccttgaccaccatcctccgtgaaatcaatatcccgcacaagagtgctactctcctcgctccgggcccataacact

SEQ ID NO: 73712 - DNA, 120 bp, Homo sapiens; identical to SEQ ID NO: 55737
  misc_feature: 677 for SV(C|O) and mtDNA

SEQ ID NO: 73713 - DNA, 120 bp, Homo sapiens
  misc_feature: 677 for SV(C|O) and mtDNA
aataaaatccccactatgcacattttatttctccaacatactcggattctaccctaccatcacacaccgcacaatcccctatctaggccttcttacgagccaaaacctgcccctactcct

SEQ ID NO: 73714 - DNA, 120 bp, Homo sapiens; identical to SEQ ID NO: 61194
  misc_feature: 676 for SV(C|O) and mtDNA

SEQ ID NO: 73715 - DNA, 120 bp, Homo sapiens
  misc_feature: 676 for SV(C|O) and mtDNA
ttatgtactacaggtggtcaagtatttatggtaccgtacaatattcatggtggctggcagtaatgtacgaattacatagcggttgttgatgggtgagtcaatacttgggtggcacccaaa

SEQ ID NO: 73716 - DNA, 120 bp, Homo sapiens; identical to SEQ ID NO: 56138
  misc_feature: 676 for SV(C|O) and mtDNA

SEQ ID NO: 73717 - DNA, 120 bp, Homo sapiens
  misc_feature: 676 for SV(C|O) and mtDNA
ttgattcgggaggatcctattggtgcgggggctttgtatgattatgggcgttgattagtagtagttactggttgaacattgtttgttggtgtatatattgtaattgagattgctcggggg

SEQ ID NO: 73718 - DNA, 120 bp, Homo sapiens
  misc_feature: 676 for SV(C|O) and mtDNA
agtatgcaatgagcgattttaggtctgtttgtcgtaggcagatggagcttgttataattatgcctcatagggatagtacaaggaaggggtaggctatgtgttttgtcagggggttgagaa

SEQ ID NO: 73719 - DNA, 120 bp, Homo sapiens
  misc_feature: 676 for SV(C|O) and mtDNA
ttacccccatactccttacactattcctcatcacccaactaaaaatattaaacacaaactaccacctacctccctcaccaaagcccataaaaataaaaaattataacaaaccctgagaac

SEQ ID NO: 73720 - DNA, 120 bp, Homo sapiens
  misc_feature: 676 for SV(C|O) and mtDNA
tgttagtattagttagttttgttgtgagtgttaggaaaagggcatacaggactaggaagcagataaggaaaatgattatgagggcgtgatcatgaaaggtgataagctcttctatgatag

SEQ ID NO: 73721 - DNA, 120 bp, Homo sapiens
  misc_feature: 676 for SV(C|O) and mtDNA
tggtgtatgcatcggggtagtccgagtaacgtcggggcattccggataggccgagaaagtgttgtgggaagaaagttagatttacgccgatgaatatgatagtgaaatggattttggcgt

SEQ ID NO: 73722 - DNA, 120 bp, Homo sapiens
  misc_feature: 676 for SV(C|O) and mtDNA
agtcaaaccacgtctacaaaatgccagtatcaggcggcggcttcgaagccaaagtgatgtttggatgtaaagtgaaatattagttggcggatgaagcagatagtgaggaaagttgagcca

SEQ ID NO: 73723 - DNA, 120 bp, Homo sapiens
  misc_feature: 676 for SV(C|O) and mtDNA
aagaaatatgtctgataaaagagttactttgatagagtaaataataggagcttaaacccccttatttctaggactatgagaatcgaacccatccctgagaatccaaaattctccgtgcca

SEQ ID NO: 73724 - DNA, 120 bp, Homo sapiens
  misc_feature: 676 for SV(C|O) and mtDNA
tagctactctcataaccctcaacacccactccctcttagccaatattgtgcctattgccatactagtctttgccgcctgcgaagcagcggtgggcctagccctactagtctcaatctcca

SEQ ID NO: 73725 - DNA, 120 bp, Homo sapiens; identical to SEQ ID NO: 56120
  misc_feature: 676 for SV(C|O) and mtDNA

SEQ ID NO: 73726 - DNA, 120 bp, Homo sapiens
  misc_feature: 676 for SV(C|O) and mtDNA
tctctgatttgtccttggaaaaaggttttcatctccggtttacaagactggtgtattagtttatactacaaggacaggcccatttgagtattttgttttcaattagggagatagttggta

SEQ ID NO: 73727 - DNA, 120 bp, Homo sapiens
  misc_feature: 676 for SV(C|O) and mtDNA
ccccttatccccatactagttattatcgaaaccatcagcctactcattcaaccaatagccctggccgtacgcctaaccgctaacattactgcaggccacctactcatgcacctaattgga

SEQ ID NO: 73728 - DNA, 120 bp, Homo sapiens
  misc_feature: 676 for SV(C|O) and mtDNA
cctctagcatcaccagtattagaggcaccgcctgcccagtgacacatgtttaacggccgcggtaccctaaccgtgcaaaggtagcataatcacttgttccttaaatagggacctgtatga

SEQ ID NO: 73729 - DNA, 120 bp, Homo sapiens; identical to SEQ ID NO: 59638
  misc_feature: 676 for SV(C|O) and mtDNA

SEQ ID NO: 73730 - DNA, 120 bp, Homo sapiens
  misc_feature: 676 for SV(C|O) and mtDNA
cagtcaaatcccttctcgtccccatggatgacccccctcagataggggtcccttgaccaccatcctccgtgaaatcaatatcccgcacaagagtgctactctcctcgctccgggcccata

SEQ ID NO: 73731 - DNA, 120 bp, Homo sapiens; identical to SEQ ID NO: 53232
  misc_feature: 676 for SV(C|O) and mtDNA

SEQ ID NO: 73732 - DNA, 120 bp, Homo sapiens
  misc_feature: 676 for SV(C|O) and mtDNA
aaaattataaccaagcataatacagcaaggactaacccctataccttctgcataatgaattaactagaaataactttgcaaggagagccaaagctaagacccccgaaaccagacgagcta

SEQ ID NO: 73733 - DNA, 120 bp, Homo sapiens; identical to SEQ ID NO: 62484
  misc_feature: 676 for SV(C|O) and mtDNA

SEQ ID NO: 73734 - DNA, 120 bp, Homo sapiens
  misc_feature: 676 for SV(C|O) and mtDNA
aacataaaaccctcattcacacgagaaaacaccctcatgttcatacacctatcccccattctcctcctatccctcaaccccgacatcattaccgggttttcctcttgtaaatatagttta

SEQ ID NO: 73735 - DNA, 120 bp, Homo sapiens
  misc_feature: 676 for SV(C|O) and mtDNA
taaaactaggcggctatggtataatacgcctcacactcattctcaaccccctgacaaaacacatagcctaccccttccttgtactatccctatgaggcataattataacaagctccatct

SEQ ID NO: 73736 - DNA, 120 bp, Homo sapiens; identical to SEQ ID NO: 59198
  misc_feature: 676 for SV(C|O) and mtDNA

SEQ ID NO: 73737 - DNA, 120 bp, Homo sapiens
  misc_feature: 676 for SV(C|O) and mtDNA
gtcaaatcccttctcgtccccatggatgacccccctcagataggggtcccttgaccaccatcctccgtgaaatcaatatcccgcacaagagtgctactctcctcgctccgggcccataac

SEQ ID NO: 73738 - DNA, 120 bp, Homo sapiens
  misc_feature: 676 for SV(C|O) and mtDNA
gccctagcccacttcttaccacaaggcacacctacaccccttatccccatactagttattatcgaaaccatcagcctactcattcaaccaatagccctggccgtacgcctaaccgctaac

SEQ ID NO: 73739 - DNA, 120 bp, Homo sapiens
  misc_feature: 676 for SV(C|O) and mtDNA
cataaaaccctcattcacacgagaaaacaccctcatgttcatacacctatcccccattctcctcctatccctcaaccccgacatcattaccgggttttcctcttgtaaatatagtttaac

SEQ ID NO: 73740 - DNA, 120 bp, Homo sapiens
  misc_feature: 676 for SV(C|O) and mtDNA
gtgatagtggttcactggataagtggcgttggcttgccatgattgtgaggggtaggagtcaggtagttagtattaggaggggggttgttagggggtcggaggaaaaggttggggaacagc

SEQ ID NO: 73741 - DNA, 120 bp, Homo sapiens
  misc_feature: 676 for SV(C|O) and mtDNA
gaaccgaattggtatatagtttaaacaaaacgaatgatttcgactcattaaattatgataatcatatttaccaaatgcccctcatttacataaatattatactagcatttaccatctcac

SEQ ID NO: 73742 - DNA, 120 bp, Homo sapiens
  misc_feature: 676 for SV(C|O) and mtDNA
cgaggtcgtaaaccctattgttgatatggactctagaataggattgcgctgttatccctagggtaacttgttccgttggtcaagttattggatcaattgagtatagtagttcgctttgac

SEQ ID NO: 73743 - DNA, 120 bp, Homo sapiens
  misc_feature: 676 for SV(C|O) and mtDNA
gctatccattggtcttaggccccaaaaattttggtgcaactccaaataaaagtaacaaccatgcacactactataaccaccctaaccctgacttccctaattccccccatccttaccacc

SEQ ID NO: 73744 - DNA, 120 bp, Homo sapiens; identical to SEQ ID NO: 55361
  misc_feature: 676 for SV(C|O) and mtDNA

SEQ ID NO: 73745 - DNA, 120 bp, Homo sapiens
  misc_feature: 676 for SV(C|O) and mtDNA
ggcctcgcccgatgtgtaggaagaggcagataaagaatattgaggcgccattggcgtgaaggtagcggatgattcagccataatttacgtctcgagtgatgtgggcgattgatgaaaagg

SEQ ID NO: 73746 - DNA, 120 bp, Homo sapiens
  misc_feature: 676 for SV(C|O) and mtDNA
gcttaacacaaagcacccaacttacacttaggagatttcaacttaacttgaccgctctgagctaaacctagccccaaacccactccaccttactaccagacaaccttagccaaaccattt

SEQ ID NO: 73747 - DNA, 120 bp, Homo sapiens
  misc_feature: 676 for SV(C|O) and mtDNA
gctatagccattatgattattaatgatgagtattgattggtagtattggttatggttcattgtccggagagtatattgttgaagaggatagctattagaaggattatggatgcggttgct

SEQ ID NO: 73748 - DNA, 120 bp, Homo sapiens
  misc_feature: 676 for SV(C|O) and mtDNA
gcagttcttgtgagctttctcggtaaataaggggtcgtaagcctctgttgtcagattcacaatctgatgttttggttaaactatatttacaagaggaaaacccggtaatgatgtcggggt

SEQ ID NO: 73749 - DNA, 120 bp, Homo sapiens
  misc_feature: 676 for SV(C|O) and mtDNA
gatgttagtattagttagttttgttgtgagtgttaggaaaagggcatacaggactaggaagcagataaggaaaatgattatgagggcgtgatcatgaaaggtgataagctcttctatgat

SEQ ID NO: 73750 - DNA, 120 bp, Homo sapiens
  misc_feature: 676 for SV(C|O) and mtDNA
caatgatatgaaaaaccatcgttgtatttcaactacaagaacaccaatgaccccaatacgcaaaattaaccccctaataaaattaattaaccactcattcatcgacctccccaccccatc

SEQ ID NO: 73751 - DNA, 120 bp, Homo sapiens
  misc_feature: 676 for SV(C|O) and mtDNA
aaccctattgttgatatggactctagaataggattgcgctgttatccctagggtaacttgttccgttggtcaagttattggatcaattgagtatagtagttcgctttgactggtgaagtc

SEQ ID NO: 73752 - DNA, 120 bp, Homo sapiens
  misc_feature: 676 for SV(C|O) and mtDNA
cagatgccaacacagcagccattcaagcaatcctatacaaccgtatcggcgatatcggtttcatcctcgccttagcatgatttatcctacactccaactcatgagacccacaacaaatag

SEQ ID NO: 73753 - DNA, 120 bp, Homo sapiens
  misc_feature: 676 for SV(C|O) and mtDNA
agacccagtaaaattgtaataagcagtgcttgaattatttggtttcggttgttttctattagactatggtgagctcaggtgattgatactcctgatgcgagtaatacggatgtgtttagg

SEQ ID NO: 73754 - DNA, 120 bp, Homo sapiens; identical to SEQ ID NO: 57586
  misc_feature: 676 for SV(C|O) and mtDNA

SEQ ID NO: 73755 - DNA, 120 bp, Homo sapiens
  misc_feature: 676 for SV(C|O) and mtDNA
cacccactccctcttagccaatattgtgcctattgccatactagtctttgccgcctgcgaagcagcggtgggcctagccctactagtctcaatctccaacacatatggcctagactacgt

SEQ ID NO: 73756 - DNA, 120 bp, Homo sapiens; identical to SEQ ID NO: 55735
  misc_feature: 676 for SV(C|O) and mtDNA

SEQ ID NO: 73757 - DNA, 120 bp, Homo sapiens
  misc_feature: 676 for SV(C|O) and mtDNA
atcacgtaggactttaatcgttgaacaaacgaacctttaatagcggctgcaccatcgggatgtcctgatccaacatcgaggtcgtaaaccctattgttgatatggactctagaataggat

SEQ ID NO: 73758 - DNA, 120 bp, Homo sapiens; identical to SEQ ID NO: 58042
  misc_feature: 676 for SV(C|O) and mtDNA

SEQ ID NO: 73759 - DNA, 120 bp, Homo sapiens; identical to SEQ ID NO: 58095
  misc_feature: 675 for SV(C|O) and mtDNA

SEQ ID NO: 73760 - DNA, 120 bp, Homo sapiens; identical to SEQ ID NO: 58438
  misc_feature: 675 for SV(C|O) and mtDNA

SEQ ID NO: 73761 - DNA, 120 bp, Homo sapiens
  misc_feature: 675 for SV(C|O) and mtDNA
gagcagatgccaacacagcagccattcaagcaatcctatacaaccgtatcggcgatatcggtttcatcctcgccttagcatgatttatcctacactccaactcatgagacccacaacaaa

SEQ ID NO: 73762 - DNA, 120 bp, Homo sapiens; identical to SEQ ID NO: 52249
  misc_feature: 675 for SV(C|O) and mtDNA

SEQ ID NO: 73763 - DNA, 120 bp, Homo sapiens
  misc_feature: 675 for SV(C|O) and mtDNA
caccctcatgttcatacacctatcccccattctcctcctatccctcaaccccgacatcattaccgggttttcctcttgtaaatatagtttaaccaaaacatcagattgtgaatctgacaa

SEQ ID NO: 73764 - DNA, 120 bp, Homo sapiens
  misc_feature: 675 for SV(C|O) and mtDNA
tatgaattcgaacagcatacccccgattccgctacgaccaactcatacacctcctatgaaaaaacttcctaccactcaccctagcattacttatatgatatgtctccatacccattacaa

SEQ ID NO: 73765 - DNA, 120 bp, Homo sapiens
  misc_feature: 675 for SV(C|O) and mtDNA
aacccaaaaaggcataattaaactttacttcctctctttcttcttcccactcatcctaaccctactcctaatcacataacctattcccccgagcaatctcaattacaatatatacaccaa

SEQ ID NO: 73766 - DNA, 120 bp, Homo sapiens; identical to SEQ ID NO: 59009
  misc_feature: 675 for SV(C|O) and mtDNA

SEQ ID NO: 73767 - DNA, 120 bp, Homo sapiens; identical to SEQ ID NO: 57774
  misc_feature: 675 for SV(C|O) and mtDNA

SEQ ID NO: 73768 - DNA, 120 bp, Homo sapiens; identical to SEQ ID NO: 56894
  misc_feature: 675 for SV(C|O) and mtDNA

SEQ ID NO: 73769 - DNA, 120 bp, Homo sapiens; identical to SEQ ID NO: 60317
  misc_feature: 675 for SV(C|O) and mtDNA

SEQ ID NO: 73770 - DNA, 120 bp, Homo sapiens
  misc_feature: 675 for SV(C|O) and mtDNA
cccttccaaacaacaatccccctctacctaaaactcacagccctcgctgtcactttcctaggacttctaacagccctagacctcaactacctaaccaacaaacttaaaataaaatcccca

SEQ ID NO: 73771 - DNA, 120 bp, Homo sapiens; identical to SEQ ID NO: 55064
  misc_feature: 675 for SV(C|O) and mtDNA

SEQ ID NO: 73772 - DNA, 120 bp, Homo sapiens
  misc_feature: 675 for SV(C|O) and mtDNA
tgatagtggttcactggataagtggcgttggcttgccatgattgtgaggggtaggagtcaggtagttagtattaggaggggggttgttagggggtcggaggaaaaggttggggaacagct

SEQ ID NO: 73773 - DNA, 120 bp, Homo sapiens; identical to SEQ ID NO: 58585
  misc_feature: 675 for SV(C|O) and mtDNA

SEQ ID NO: 73774 - DNA, 120 bp, Homo sapiens
  misc_feature: 675 for SV(C|O) and mtDNA
tcgaggtcgtaaaccctattgttgatatggactctagaataggattgcgctgttatccctagggtaacttgttccgttggtcaagttattggatcaattgagtatagtagttcgctttga

SEQ ID NO: 73775 - DNA, 120 bp, Homo sapiens; identical to SEQ ID NO: 57329
  misc_feature: 675 for SV(C|O) and mtDNA

SEQ ID NO: 73776 - DNA, 120 bp, Homo sapiens; identical to SEQ ID NO: 60896
  misc_feature: 675 for SV(C|O) and mtDNA

SEQ ID NO: 73777 - DNA, 120 bp, Homo sapiens
  misc_feature: 675 for SV(C|O) and mtDNA
tatgggcccgatagcttatttagctgaccttactttaggatggggtgtgataggtggcacggagaattttggattctcagggatgggttcgattctcatagtcctagaaataagggggtt

SEQ ID NO: 73778 - DNA, 120 bp, Homo sapiens
  misc_feature: 675 for SV(C|O) and mtDNA
gtacttgccgcagtactcttaaaactaggcggctatggtataatacgcctcacactcattctcaaccccctgacaaaacacatagcctaccccttccttgtactatccctatgaggcata

SEQ ID NO: 73779 - DNA, 120 bp, Homo sapiens
  misc_feature: 675 for SV(C|O) and mtDNA
attgagatgggggctagtttttgtcatgtgagaagaagcaggccggatgtcagaggggtgccttgggtaacctctgggacccagaagtgaaagggggctattcctagttttattgctata

SEQ ID NO: 73780 - DNA, 120 bp, Homo sapiens
  misc_feature: 675 for SV(C|O) and mtDNA
atagtttaaattagaatcttagctttgggtgctaatggtggagttaaagactttttctctgatttgtccttggaaaaaggttttcatctccggtttacaagactggtgtattagtttata

SEQ ID NO: 73781 - DNA, 120 bp, Homo sapiens; identical to SEQ ID NO: 52432
  misc_feature: 675 for SV(C|O) and mtDNA

SEQ ID NO: 73782 - DNA, 120 bp, Homo sapiens
  misc_feature: 675 for SV(C|O) and mtDNA
ctaggcggctatggtataatacgcctcacactcattctcaaccccctgacaaaacacatagcctaccccttccttgtactatccctatgaggcataattataacaagctccatctgccta

SEQ ID NO: 73783 - DNA, 120 bp, Homo sapiens
  misc_feature: 675 for SV(C|O) and mtDNA
cacccacccaagaacagggtttgttaagatggcagagcccggtaatcgcataaaacttaaaactttacagtcagaggttcaattcctcttcttaacaacatacccatggccaacctccta

SEQ ID NO: 73784 - DNA, 120 bp, Homo sapiens
  misc_feature: 675 for SV(C|O) and mtDNA
tactagtataccgctcacacctcatatcctccctactatgcctagaaggaataatactatcactgttcattatagctactctcataaccctcaacacccactccctcttagccaatattg

SEQ ID NO: 73785 - DNA, 120 bp, Homo sapiens; identical to SEQ ID NO: 54395
  misc_feature: 675 for SV(C|O) and mtDNA

SEQ ID NO: 73786 - DNA, 120 bp, Homo sapiens; identical to SEQ ID NO: 54977
  misc_feature: 675 for SV(C|O) and mtDNA

SEQ ID NO: 73787 - DNA, 120 bp, Homo sapiens; identical to SEQ ID NO: 54580
  misc_feature: 675 for SV(C|O) and mtDNA

SEQ ID NO: 73788 - DNA, 120 bp, Homo sapiens; identical to SEQ ID NO: 57492
  misc_feature: 675 for SV(C|O) and mtDNA

SEQ ID NO: 73789 - DNA, 120 bp, Homo sapiens; identical to SEQ ID NO: 56544
  misc_feature: 675 for SV(C|O) and mtDNA

SEQ ID NO: 73790 - DNA, 120 bp, Homo sapiens; identical to SEQ ID NO: 52321
  misc_feature: 675 for SV(C|O) and mtDNA

SEQ ID NO: 73791 - DNA, 120 bp, Homo sapiens; identical to SEQ ID NO: 55869
  misc_feature: 675 for SV(C|O) and mtDNA

SEQ ID NO: 73792 - DNA, 120 bp, Homo sapiens
  misc_feature: 675 for SV(C|O) and mtDNA
ggtccctatttaaggaacaagtgattatgctacctttgcacggttagggtaccgcggccgttaaacatgtgtcactgggcaggcggtgcctctaatactggtgatgctagaggtgatgtt

SEQ ID NO: 73793 - DNA, 120 bp, Homo sapiens
  misc_feature: 675 for SV(C|O) and mtDNA
gaccaatgatatgaaaaaccatcgttgtatttcaactacaagaacaccaatgaccccaatacgcaaaattaaccccctaataaaattaattaaccactcattcatcgacctccccacccc

SEQ ID NO: 73794 - DNA, 120 bp, Homo sapiens; identical to SEQ ID NO: 58739
  misc_feature: 675 for SV(C|O) and mtDNA

SEQ ID NO: 73795 - DNA, 120 bp, Homo sapiens
  misc_feature: 675 for SV(C|O) and mtDNA
cttcaatcagccacatagccctcgtagtaacagccattctcatccaaaccccctgaagcttcaccggcgcagtcattctcataatcgcccacggacttacatcctcattactattctgcc

SEQ ID NO: 73796 - DNA, 120 bp, Homo sapiens; identical to SEQ ID NO: 57178
  misc_feature: 675 for SV(C|O) and mtDNA

SEQ ID NO: 73797 - DNA, 120 bp, Homo sapiens
  misc_feature: 675 for SV(C|O) and mtDNA
gctggagattgtaatgggtatggagacatatcatataagtaatgctagggtgagtggtaggaagttttttcataggaggtgtatgagttggtcgtagcggaatcgggggtatgctgttcg

SEQ ID NO: 73798 - DNA, 120 bp, Homo sapiens
  misc_feature: 675 for SV(C|O) and mtDNA
ctatggagctttaatttattaatgcaaacagtacctaacaaacccacaggtcctaaactaccaaacctgcattaaaaatttcggttggggcgacctcggagcagaacccaacctccgagc

SEQ ID NO: 73799 - DNA, 120 bp, Homo sapiens; identical to SEQ ID NO: 56676
  misc_feature: 675 for SV(C|O) and mtDNA

SEQ ID NO: 73800 - DNA, 120 bp, Homo sapiens; identical to SEQ ID NO: 54294
  misc_feature: 675 for SV(C|O) and mtDNA

SEQ ID NO: 73801 - DNA, 120 bp, Homo sapiens
  misc_feature: 675 for SV(C|O) and mtDNA
gaataggattgcgctgttatccctagggtaacttgttccgttggtcaagttattggatcaattgagtatagtagttcgctttgactggtgaagtcttagcatgtactgctcggaggttgg

SEQ ID NO: 73802 - DNA, 120 bp, Homo sapiens
  misc_feature: 675 for SV(C|O) and mtDNA
catcgggtgatgatagccaaggtggggataagtgtggtttcgaagaagatataaaatatgattagttctgtggctgtgaatgttataattaaggagatttgtagggagattagtatagag

SEQ ID NO: 73803 - DNA, 120 bp, Homo sapiens
  misc_feature: 675 for SV(C|O) and mtDNA
aaagtcctaatagtagaagaaccctccataaacctggagtgactatatggatgccccccaccctaccacacattcgaagaacccgtatacataaaatctagacaaaaaaggaaggaatcg

SEQ ID NO: 73804 - DNA, 120 bp, Homo sapiens
  misc_feature: 675 for SV(C|O) and mtDNA
atagagaggtagagtttttttcgtgatagtggttcactggataagtggcgttggcttgccatgattgtgaggggtaggagtcaggtagttagtattaggaggggggttgttagggggtcg

SEQ ID NO: 73805 - DNA, 120 bp, Homo sapiens; identical to SEQ ID NO: 55050
  misc_feature: 675 for SV(C|O) and mtDNA

SEQ ID NO: 73806 - DNA, 120 bp, Homo sapiens
  misc_feature: 675 for SV(C|O) and mtDNA
caccctatgtcgcagtatctgtctttgattcctgcctcatcctattatttatcgcacctacgttcaatattacagacgaacatacttactaaagtgtgttaattaattaatgcttgtagg

SEQ ID NO: 73807 - DNA, 120 bp, Homo sapiens
  misc_feature: 675 for SV(C|O) and mtDNA
acattacagtcaaatcccttctcgtccccatggatgacccccctcagataggggtcccttgaccaccatcctccgtgaaatcaatatcccgcacaagagtgctactctcctcgctccggg

SEQ ID NO: 73808 - DNA, 120 bp, Homo sapiens
  misc_feature: 675 for SV(C|O) and mtDNA
aatgatccgtaatataggcctcgcccgatgtgtaggaagaggcagataaagaatattgaggcgccattggcgtgaaggtagcggatgattcagccataatttacgtctcgagtgatgtgg

SEQ ID NO: 73809 - DNA, 120 bp, Homo sapiens
  misc_feature: 675 for SV(C|O) and mtDNA
aggaaaaggttggggaacagctaaataggttgttgttgatttggttaaaaaatagtagagggatgatgctaataattaggctgtgggtggttgtgttgattcaaattatgtgttttttgg

SEQ ID NO: 73810 - DNA, 120 bp, Homo sapiens; identical to SEQ ID NO: 59622
  misc_feature: 675 for SV(C|O) and mtDNA

SEQ ID NO: 73811 - DNA, 120 bp, Homo sapiens
  misc_feature: 675 for SV(C|O) and mtDNA
agaataggattgcgctgttatccctagggtaacttgttccgttggtcaagttattggatcaattgagtatagtagttcgctttgactggtgaagtcttagcatgtactgctcggaggttg

SEQ ID NO: 73812 - DNA, 120 bp, Homo sapiens; identical to SEQ ID NO: 56211
  misc_feature: 675 for SV(C|O) and mtDNA

SEQ ID NO: 73813 - DNA, 120 bp, Homo sapiens
  misc_feature: 675 for SV(C|O) and mtDNA
aatgccattgcgattagaatgggtacaatgaggagtaggaggttggccatgggtatgttgttaagaagaggaattgaacctctgactgtaaagttttaagttttatgcgattaccgggct

SEQ ID NO: 73814 - DNA, 120 bp, Homo sapiens
  misc_feature: 675 for SV(C|O) and mtDNA
acgcgatagcattgcgagacgctggagccggagcaccctatgtcgcagtatctgtctttgattcctgcctcatcctattatttatcgcacctacgttcaatattacagacgaacatactt

SEQ ID NO: 73815 - DNA, 120 bp, Homo sapiens
  misc_feature: 675 for SV(C|O) and mtDNA
accgaattggtatatagtttaaacaaaacgaatgatttcgactcattaaattatgataatcatatttaccaaatgcccctcatttacataaatattatactagcatttaccatctcactt

SEQ ID NO: 73816 - DNA, 120 bp, Homo sapiens
  misc_feature: 674 for SV(C|O) and mtDNA
ttgtcgtaggcagatggagcttgttataattatgcctcatagggatagtacaaggaaggggtaggctatgtgttttgtcagggggttgagaatgagtgtgaggcgtattataccatagcc

SEQ ID NO: 73817 - DNA, 120 bp, Homo sapiens; identical to SEQ ID NO: 57918
  misc_feature: 674 for SV(C|O) and mtDNA

SEQ ID NO: 73818 - DNA, 120 bp, Homo sapiens
  misc_feature: 674 for SV(C|O) and mtDNA
gtcataagtggagtccgtaaagaggtatctttactataaaagctattgtgtaagctagtcatattaagttgttggctcaggagtttgatagttcttgggcagtgagagtgagtagtagaa

SEQ ID NO: 73819 - DNA, 120 bp, Homo sapiens; identical to SEQ ID NO: 60701
  misc_feature: 674 for SV(C|O) and mtDNA

SEQ ID NO: 73820 - DNA, 120 bp, Homo sapiens
  misc_feature: 674 for SV(C|O) and mtDNA
ggaatagtgtaaggagtatgggggtaattatggtgggccatacggtagtatttagttggggcatttcactgtaaagaggtgttggttctcttaatctttaacttaaaaggttaatgctaa

SEQ ID NO: 73821 - DNA, 120 bp, Homo sapiens
  misc_feature: 674 for SV(C|O) and mtDNA
tcaaatcccttctcgtccccatggatgacccccctcagataggggtcccttgaccaccatcctccgtgaaatcaatatcccgcacaagagtgctactctcctcgctccgggcccataaca

SEQ ID NO: 73822 - DNA, 120 bp, Homo sapiens
  misc_feature: 674 for SV(C|O) and mtDNA
tagagagagtaaaaaatttaacacccatagtaggcctaaaagcagccaccaattaagaaagcgttcaagctcaacacccactacctaaaaaatcccaaacatataactgaactcctcaca

SEQ ID NO: 73823 - DNA, 120 bp, Homo sapiens; identical to SEQ ID NO: 56337
  misc_feature: 674 for SV(C|O) and mtDNA

SEQ ID NO: 73824 - DNA, 120 bp, Homo sapiens; identical to SEQ ID NO: 52377
  misc_feature: 674 for SV(C|O) and mtDNA

SEQ ID NO: 73825 - DNA, 120 bp, Homo sapiens
  misc_feature: 674 for SV(C|O) and mtDNA
caacccaaaaaggcataattaaactttacttcctctctttcttcttcccactcatcctaaccctactcctaatcacataacctattcccccgagcaatctcaattacaatatatacacca

SEQ ID NO: 73826 - DNA, 120 bp, Homo sapiens; identical to SEQ ID NO: 56043
  misc_feature: 674 for SV(C|O) and mtDNA

SEQ ID NO: 73827 - DNA, 120 bp, Homo sapiens; identical to SEQ ID NO: 56404
  misc_feature: 674 for SV(C|O) and mtDNA

SEQ ID NO: 73828 - DNA, 120 bp, Homo sapiens; identical to SEQ ID NO: 53918
  misc_feature: 674 for SV(C|O) and mtDNA

SEQ ID NO: 73829 - DNA, 120 bp, Homo sapiens
  misc_feature: 674 for SV(C|O) and mtDNA
ctggagattgtaatgggtatggagacatatcatataagtaatgctagggtgagtggtaggaagttttttcataggaggtgtatgagttggtcgtagcggaatcgggggtatgctgttcga

SEQ ID NO: 73830 - DNA, 120 bp, Homo sapiens
  misc_feature: 674 for SV(C|O) and mtDNA
tccctcttagccaatattgtgcctattgccatactagtctttgccgcctgcgaagcagcggtgggcctagccctactagtctcaatctccaacacatatggcctagactacgtacataac

SEQ ID NO: 73831 - DNA, 120 bp, Homo sapiens; identical to SEQ ID NO: 56797
  misc_feature: 674 for SV(C|O) and mtDNA

SEQ ID NO: 73832 - DNA, 120 bp, Homo sapiens
  misc_feature: 674 for SV(C|O) and mtDNA
tcaaaccacgtctacaaaatgccagtatcaggcggcggcttcgaagccaaagtgatgtttggatgtaaagtgaaatattagttggcggatgaagcagatagtgaggaaagttgagccaat

SEQ ID NO: 73833 - DNA, 120 bp, Homo sapiens
  misc_feature: 674 for SV(C|O) and mtDNA
tatgcatcggggtagtccgagtaacgtcggggcattccggataggccgagaaagtgttgtgggaagaaagttagatttacgccgatgaatatgatagtgaaatggattttggcgtaggtt

SEQ ID NO: 73834 - DNA, 120 bp, Homo sapiens
  misc_feature: 674 for SV(C|O) and mtDNA
tatagagaggtagagtttttttcgtgatagtggttcactggataagtggcgttggcttgccatgattgtgaggggtaggagtcaggtagttagtattaggaggggggttgttagggggtc

SEQ ID NO: 73835 - DNA, 120 bp, Homo sapiens
  misc_feature: 674 for SV(C|O) and mtDNA
cccagcccatgacccctaacaggggccctctcagccctcctaatgacctccggcctagccatgtgatttcacttccactccataacgctcctcatactaggcctactaaccaacacacta

SEQ ID NO: 73836 - DNA, 120 bp, Homo sapiens; identical to SEQ ID NO: 58827
  misc_feature: 674 for SV(C|O) and mtDNA

SEQ ID NO: 73837 - DNA, 120 bp, Homo sapiens; identical to SEQ ID NO: 55169
  misc_feature: 674 for SV(C|O) and mtDNA

SEQ ID NO: 73838 - DNA, 120 bp, Homo sapiens
  misc_feature: 674 for SV(C|O) and mtDNA
ctccaccttactaccagacaaccttagccaaaccatttacccaaataaagtataggcgatagaaattgaaacctggcgcaatagatatagtaccgcaagggaaagatgaaaaattataac

SEQ ID NO: 73839 - DNA, 120 bp, Homo sapiens
  misc_feature: 674 for SV(C|O) and mtDNA
aacccagcccatgacccctaacaggggccctctcagccctcctaatgacctccggcctagccatgtgatttcacttccactccataacgctcctcatactaggcctactaaccaacacac

SEQ ID NO: 73840 - DNA, 120 bp, Homo sapiens
  misc_feature: 674 for SV(C|O) and mtDNA
cttgcttgtaagcatggggagggggttttgatgtggattgggtttttatgtactacaggtggtcaagtatttatggtaccgtacaatattcatggtggctggcagtaatgtacgaattac

SEQ ID NO: 73841 - DNA, 120 bp, Homo sapiens
  misc_feature: 674 for SV(C|O) and mtDNA
aatcctatttattacctcagaagtttttttcttcgcaggatttttctgagccttttaccactccagcctagcccctaccccccaattaggagggcactggcccccaacaggcatcacccc

SEQ ID NO: 73842 - DNA, 120 bp, Homo sapiens
  misc_feature: 674 for SV(C|O) and mtDNA
ggggtatgggcccgatagcttatttagctgaccttactttaggatggggtgtgataggtggcacggagaattttggattctcagggatgggttcgattctcatagtcctagaaataaggg

SEQ ID NO: 73843 - DNA, 120 bp, Homo sapiens
  misc_feature: 674 for SV(C|O) and mtDNA
ggggcctttgcgtagttgtatatagcctagaatttttcgttcggtaagcattaggaatgccattgcgattagaatgggtacaatgaggagtaggaggttggccatgggtatgttgttaag

SEQ ID NO: 73844 - DNA, 120 bp, Homo sapiens
  misc_feature: 674 for SV(C|O) and mtDNA
cacacccacccaagaacagggtttgttaagatggcagagcccggtaatcgcataaaacttaaaactttacagtcagaggttcaattcctcttcttaacaacatacccatggccaacctcc

SEQ ID NO: 73845 - DNA, 120 bp, Homo sapiens
  misc_feature: 674 for SV(C|O) and mtDNA
cgtgcaaaggtagcataatcacttgttccttaaatagggacctgtatgaatggctccacgagggttcagctgtctcttacttttaaccagtgaaattgacctgcccgtgaagaggcgggc

SEQ ID NO: 73846 - DNA, 120 bp, Homo sapiens
  misc_feature: 674 for SV(C|O) and mtDNA
gagcgattttaggtctgtttgtcgtaggcagatggagcttgttataattatgcctcatagggatagtacaaggaaggggtaggctatgtgttttgtcagggggttgagaatgagtgtgag

SEQ ID NO: 73847 - DNA, 120 bp, Homo sapiens
  misc_feature: 674 for SV(C|O) and mtDNA
ctgtattatgcttggttataatttttcatctttcccttgcggtactatatctattgcgccaggtttcaatttctatcgcctatactttatttgggtaaatggtttggctaaggttgtctg

SEQ ID NO: 73848 - DNA, 120 bp, Homo sapiens; identical to SEQ ID NO: 58222
  misc_feature: 674 for SV(C|O) and mtDNA

SEQ ID NO: 73849 - DNA, 120 bp, Homo sapiens; identical to SEQ ID NO: 61124
  misc_feature: 674 for SV(C|O) and mtDNA

SEQ ID NO: 73850 - DNA, 120 bp, Homo sapiens
  misc_feature: 674 for SV(C|O) and mtDNA
cctcttagccaatattgtgcctattgccatactagtctttgccgcctgcgaagcagcggtgggcctagccctactagtctcaatctccaacacatatggcctagactacgtacataacct

SEQ ID NO: 73851 - DNA, 120 bp, Homo sapiens
  misc_feature: 674 for SV(C|O) and mtDNA
cacattacagtcaaatcccttctcgtccccatggatgacccccctcagataggggtcccttgaccaccatcctccgtgaaatcaatatcccgcacaagagtgctactctcctcgctccgg

SEQ ID NO: 73852 - DNA, 120 bp, Homo sapiens
  misc_feature: 674 for SV(C|O) and mtDNA
cccgatagcttatttagctgaccttactttaggatggggtgtgataggtggcacggagaattttggattctcagggatgggttcgattctcatagtcctagaaataagggggtttaagct

SEQ ID NO: 73853 - DNA, 120 bp, Homo sapiens; identical to SEQ ID NO: 58609
  misc_feature: 674 for SV(C|O) and mtDNA

SEQ ID NO: 73854 - DNA, 120 bp, Homo sapiens
  misc_feature: 674 for SV(C|O) and mtDNA
attgctatagccattatgattattaatgatgagtattgattggtagtattggttatggttcattgtccggagagtatattgttgaagaggatagctattagaaggattatggatgcggtt

SEQ ID NO: 73855 - DNA, 120 bp, Homo sapiens
  misc_feature: 674 for SV(C|O) and mtDNA
aatcagtgaatgaagcctcctatgatggcaaatacagctcctattgataggacatagtggaagtgagctacaacgtagtacgtgtcgtgtagtacgatgtctagtgatgagtttgctaat

SEQ ID NO: 73856 - DNA, 120 bp, Homo sapiens
  misc_feature: 674 for SV(C|O) and mtDNA
acagtcaaatcccttctcgtccccatggatgacccccctcagataggggtcccttgaccaccatcctccgtgaaatcaatatcccgcacaagagtgctactctcctcgctccgggcccat

SEQ ID NO: 73857 - DNA, 120 bp, Homo sapiens
  misc_feature: 674 for SV(C|O) and mtDNA
aacaaactaggaggcgtccttgccctattactatccatcctcatcctagcaataatccccatcctccatatatccaaacaacaaagcataatatttcgcccactaagccaatcactttat

SEQ ID NO: 73858 - DNA, 120 bp, Homo sapiens
  misc_feature: 674 for SV(C|O) and mtDNA
aggctacaaagtaagcgcaagtacccacgtaaagacgttaggtcaaggtgtagcccatgaggtggcaagaaatgggctacattttctaccccagaaaactacgatagcccttatgaaact

SEQ ID NO: 73859 - DNA, 120 bp, Homo sapiens; identical to SEQ ID NO: 55821
  misc_feature: 674 for SV(C|O) and mtDNA

SEQ ID NO: 73860 - DNA, 120 bp, Homo sapiens
  misc_feature: 674 for SV(C|O) and mtDNA
aaaaattataaccaagcataatacagcaaggactaacccctataccttctgcataatgaattaactagaaataactttgcaaggagagccaaagctaagacccccgaaaccagacgagct

SEQ ID NO: 73861 - DNA, 120 bp, Homo sapiens
  misc_feature: 673 for SV(C|O) and mtDNA
gtagagtttttttcgtgatagtggttcactggataagtggcgttggcttgccatgattgtgaggggtaggagtcaggtagttagtattaggaggggggttgttagggggtcggaggaaaa

SEQ ID NO: 73862 - DNA, 120 bp, Homo sapiens; identical to SEQ ID NO: 57162
  misc_feature: 673 for SV(C|O) and mtDNA

SEQ ID NO: 73863 - DNA, 120 bp, Homo sapiens
  misc_feature: 673 for SV(C|O) and mtDNA
ggtagagtttttttcgtgatagtggttcactggataagtggcgttggcttgccatgattgtgaggggtaggagtcaggtagttagtattaggaggggggttgttagggggtcggaggaaa

SEQ ID NO: 73864 - DNA, 120 bp, Homo sapiens; identical to SEQ ID NO: 58096
  misc_feature: 673 for SV(C|O) and mtDNA

SEQ ID NO: 73865 - DNA, 120 bp, Homo sapiens; identical to SEQ ID NO: 56504
  misc_feature: 673 for SV(C|O) and mtDNA

SEQ ID NO: 73866 - DNA, 120 bp, Homo sapiens
  misc_feature: 673 for SV(C|O) and mtDNA
tggtatatagtttaaacaaaacgaatgatttcgactcattaaattatgataatcatatttaccaaatgcccctcatttacataaatattatactagcatttaccatctcacttctaggaa

SEQ ID NO: 73867 - DNA, 120 bp, Homo sapiens
  misc_feature: 673 for SV(C|O) and mtDNA
ttcaatcagccacatagccctcgtagtaacagccattctcatccaaaccccctgaagcttcaccggcgcagtcattctcataatcgcccacggacttacatcctcattactattctgcct

SEQ ID NO: 73868 - DNA, 120 bp, Homo sapiens; identical to SEQ ID NO: 57131
  misc_feature: 673 for SV(C|O) and mtDNA

SEQ ID NO: 73869 - DNA, 120 bp, Homo sapiens
  misc_feature: 673 for SV(C|O) and mtDNA
tgccctagcccacttcttaccacaaggcacacctacaccccttatccccatactagttattatcgaaaccatcagcctactcattcaaccaatagccctggccgtacgcctaaccgctaa

SEQ ID NO: 73870 - DNA, 120 bp, Homo sapiens
  misc_feature: 673 for SV(C|O) and mtDNA
tggggcctttgcgtagttgtatatagcctagaatttttcgttcggtaagcattaggaatgccattgcgattagaatgggtacaatgaggagtaggaggttggccatgggtatgttgttaa

SEQ ID NO: 73871 - DNA, 120 bp, Homo sapiens
  misc_feature: 673 for SV(C|O) and mtDNA
ctaatcaacgcccataatcatacaaagcccccgcaccaataggatcctcccgaatcaaccctgacccctctccttcataaattattcagcttcctacactattaaagtttaccacaacca

SEQ ID NO: 73872 - DNA, 120 bp, Homo sapiens; identical to SEQ ID NO: 55018
  misc_feature: 673 for SV(C|O) and mtDNA

SEQ ID NO: 73873 - DNA, 120 bp, Homo sapiens
  misc_feature: 673 for SV(C|O) and mtDNA
tctctacaaaccacaaagacattggaacactatacctattattcggcgcatgagctggagtcctaggcacagctctaagcctccttattcgagccgagctgggccagccaggcaaccttc

SEQ ID NO: 73874 - DNA, 120 bp, Homo sapiens; identical to SEQ ID NO: 58770
  misc_feature: 673 for SV(C|O) and mtDNA

SEQ ID NO: 73875 - DNA, 120 bp, Homo sapiens
  misc_feature: 673 for SV(C|O) and mtDNA
tccaccttactaccagacaaccttagccaaaccatttacccaaataaagtataggcgatagaaattgaaacctggcgcaatagatatagtaccgcaagggaaagatgaaaaattataacc

SEQ ID NO: 73876 - DNA, 120 bp, Homo sapiens
  misc_feature: 673 for SV(C|O) and mtDNA
cggttagcgggggcaggcctcctagggagaggagggtggatggaattaagggtgttagtcatgttagcttgtttcaggtgcgagatagtagtagggtcgtggtgctggagtttaagttga

SEQ ID NO: 73877 - DNA, 120 bp, Homo sapiens
  misc_feature: 673 for SV(C|O) and mtDNA
gcagatgccaacacagcagccattcaagcaatcctatacaaccgtatcggcgatatcggtttcatcctcgccttagcatgatttatcctacactccaactcatgagacccacaacaaata

SEQ ID NO: 73878 - DNA, 120 bp, Homo sapiens
  misc_feature: 673 for SV(C|O) and mtDNA
tatgttgtttatgcggggaaacgccatatcgggggcaccgattattaggggaactagtcagttgccaaagcctccgattatgatgggtattactatgaagaagattattacaaatgcatg

SEQ ID NO: 73879 - DNA, 120 bp, Homo sapiens; identical to SEQ ID NO: 54445
  misc_feature: 673 for SV(C|O) and mtDNA

SEQ ID NO: 73880 - DNA, 120 bp, Homo sapiens
  misc_feature: 673 for SV(C|O) and mtDNA
tagtatagagaggtagagtttttttcgtgatagtggttcactggataagtggcgttggcttgccatgattgtgaggggtaggagtcaggtagttagtattaggaggggggttgttagggg

SEQ ID NO: 73881 - DNA, 120 bp, Homo sapiens
  misc_feature: 673 for SV(C|O) and mtDNA
taccgagcctggtgatagctggttgtccaagatagaatcttagttcaactttaaatttgcccacagaaccctctaaatccccttgtaaatttaactgttagtccaaagaggaacagctct

SEQ ID NO: 73882 - DNA, 120 bp, Homo sapiens
  misc_feature: 673 for SV(C|O) and mtDNA
taatcaacgcccataatcatacaaagcccccgcaccaataggatcctcccgaatcaaccctgacccctctccttcataaattattcagcttcctacactattaaagtttaccacaaccac

SEQ ID NO: 73883 - DNA, 120 bp, Homo sapiens; identical to SEQ ID NO: 60410
  misc_feature: 673 for SV(C|O) and mtDNA

SEQ ID NO: 73884 - DNA, 120 bp, Homo sapiens; identical to SEQ ID NO: 57412
  misc_feature: 673 for SV(C|O) and mtDNA

SEQ ID NO: 73885 - DNA, 120 bp, Homo sapiens
  misc_feature: 673 for SV(C|O) and mtDNA
gtgtatatattgtaattgagattgctcgggggaataggttatgtgattaggagtagggttaggatgagtgggaagaagaaagagaggaagtaaagtttaattatgcctttttgggttgag

SEQ ID NO: 73886 - DNA, 120 bp, Homo sapiens; identical to SEQ ID NO: 55780
  misc_feature: 673 for SV(C|O) and mtDNA

SEQ ID NO: 73887 - DNA, 120 bp, Homo sapiens
  misc_feature: 673 for SV(C|O) and mtDNA
agctatccattggtcttaggccccaaaaattttggtgcaactccaaataaaagtaacaaccatgcacactactataaccaccctaaccctgacttccctaattccccccatccttaccac

SEQ ID NO: 73888 - DNA, 120 bp, Homo sapiens
  misc_feature: 673 for SV(C|O) and mtDNA
gtattatgcttggttataatttttcatctttcccttgcggtactatatctattgcgccaggtttcaatttctatcgcctatactttatttgggtaaatggtttggctaaggttgtctggt

SEQ ID NO: 73889 - DNA, 120 bp, Homo sapiens
  misc_feature: 673 for SV(C|O) and mtDNA
agcgaagggttgtagtagcccgtaggggcctacaacgttggggcctttgcgtagttgtatatagcctagaatttttcgttcggtaagcattaggaatgccattgcgattagaatgggtac

SEQ ID NO: 73890 - DNA, 120 bp, Homo sapiens; identical to SEQ ID NO: 54736
  misc_feature: 673 for SV(C|O) and mtDNA

SEQ ID NO: 73891 - DNA, 120 bp, Homo sapiens; identical to SEQ ID NO: 57415
  misc_feature: 673 for SV(C|O) and mtDNA

SEQ ID NO: 73892 - DNA, 120 bp, Homo sapiens
  misc_feature: 673 for SV(C|O) and mtDNA
aatcaacgcccataatcatacaaagcccccgcaccaataggatcctcccgaatcaaccctgacccctctccttcataaattattcagcttcctacactattaaagtttaccacaaccacc

SEQ ID NO: 73893 - DNA, 120 bp, Homo sapiens; identical to SEQ ID NO: 58718
  misc_feature: 673 for SV(C|O) and mtDNA

SEQ ID NO: 73894 - DNA, 120 bp, Homo sapiens
  misc_feature: 673 for SV(C|O) and mtDNA
aaataaaatccccactatgcacattttatttctccaacatactcggattctaccctaccatcacacaccgcacaatcccctatctaggccttcttacgagccaaaacctgcccctactcc

SEQ ID NO: 73895 - DNA, 120 bp, Homo sapiens
  misc_feature: 673 for SV(C|O) and mtDNA
atagctactctcataaccctcaacacccactccctcttagccaatattgtgcctattgccatactagtctttgccgcctgcgaagcagcggtgggcctagccctactagtctcaatctcc

SEQ ID NO: 73896 - DNA, 120 bp, Homo sapiens
  misc_feature: 673 for SV(C|O) and mtDNA
gcccgatagcttatttagctgaccttactttaggatggggtgtgataggtggcacggagaattttggattctcagggatgggttcgattctcatagtcctagaaataagggggtttaagc

SEQ ID NO: 73897 - DNA, 120 bp, Homo sapiens; identical to SEQ ID NO: 57312
  misc_feature: 673 for SV(C|O) and mtDNA

SEQ ID NO: 73898 - DNA, 120 bp, Homo sapiens
  misc_feature: 673 for SV(C|O) and mtDNA
gcgtcaaagtatttagctgactcgccacactccacggaagcaatatgaaatgatctgctgcagtgctctgagccctaggattcatctttcttttcaccgtaggcggcctgactggcattg

SEQ ID NO: 73899 - DNA, 120 bp, Homo sapiens; identical to SEQ ID NO: 60008
  misc_feature: 673 for SV(C|O) and mtDNA

SEQ ID NO: 73900 - DNA, 120 bp, Homo sapiens; identical to SEQ ID NO: 58866
  misc_feature: 673 for SV(C|O) and mtDNA

SEQ ID NO: 73901 - DNA, 120 bp, Homo sapiens; identical to SEQ ID NO: 59562
  misc_feature: 673 for SV(C|O) and mtDNA

SEQ ID NO: 73902 - DNA, 120 bp, Homo sapiens
  misc_feature: 673 for SV(C|O) and mtDNA
gaggaaaaggttggggaacagctaaataggttgttgttgatttggttaaaaaatagtagagggatgatgctaataattaggctgtgggtggttgtgttgattcaaattatgtgttttttg

SEQ ID NO: 73903 - DNA, 120 bp, Homo sapiens
  misc_feature: 673 for SV(C|O) and mtDNA
aggattgcgctgttatccctagggtaacttgttccgttggtcaagttattggatcaattgagtatagtagttcgctttgactggtgaagtcttagcatgtactgctcggaggttgggttc

SEQ ID NO: 73904 - DNA, 120 bp, Homo sapiens
  misc_feature: 673 for SV(C|O) and mtDNA
cgtgatagtggttcactggataagtggcgttggcttgccatgattgtgaggggtaggagtcaggtagttagtattaggaggggggttgttagggggtcggaggaaaaggttggggaacag

SEQ ID NO: 73905 - DNA, 120 bp, Homo sapiens
  misc_feature: 673 for SV(C|O) and mtDNA
attgacccagcgatgggggcttcgacatgggctttagggagtcataagtggagtccgtaaagaggtatctttactataaaagctattgtgtaagctagtcatattaagttgttggctcag

SEQ ID NO: 73906 - DNA, 120 bp, Homo sapiens
  misc_feature: 673 for SV(C|O) and mtDNA
cgcaatagatatagtaccgcaagggaaagatgaaaaattataaccaagcataatacagcaaggactaacccctataccttctgcataatgaattaactagaaataactttgcaaggagag

SEQ ID NO: 73907 - DNA, 120 bp, Homo sapiens
  misc_feature: 673 for SV(C|O) and mtDNA
agagtttttttcgtgatagtggttcactggataagtggcgttggcttgccatgattgtgaggggtaggagtcaggtagttagtattaggaggggggttgttagggggtcggaggaaaagg

SEQ ID NO: 73908 - DNA, 120 bp, Homo sapiens
  misc_feature: 673 for SV(C|O) and mtDNA
agtatagagaggtagagtttttttcgtgatagtggttcactggataagtggcgttggcttgccatgattgtgaggggtaggagtcaggtagttagtattaggaggggggttgttaggggg

SEQ ID NO: 73909 - DNA, 120 bp, Homo sapiens
  misc_feature: 673 for SV(C|O) and mtDNA
ccattggtcttaggccccaaaaattttggtgcaactccaaataaaagtaacaaccatgcacactactataaccaccctaaccctgacttccctaattccccccatccttaccaccctcgt

SEQ ID NO: 73910 - DNA, 120 bp, Homo sapiens
  misc_feature: 673 for SV(C|O) and mtDNA
cattggtcttaggccccaaaaattttggtgcaactccaaataaaagtaacaaccatgcacactactataaccaccctaaccctgacttccctaattccccccatccttaccaccctcgtt

SEQ ID NO: 73911 - DNA, 120 bp, Homo sapiens; identical to SEQ ID NO: 57706
  misc_feature: 673 for SV(C|O) and mtDNA

SEQ ID NO: 73912 - DNA, 120 bp, Homo sapiens; identical to SEQ ID NO: 53220
  misc_feature: 673 for SV(C|O) and mtDNA

SEQ ID NO: 73913 - DNA, 120 bp, Homo sapiens; identical to SEQ ID NO: 53194
  misc_feature: 673 for SV(C|O) and mtDNA

SEQ ID NO: 73914 - DNA, 120 bp, Homo sapiens
  misc_feature: 673 for SV(C|O) and mtDNA
agaatcgaacccatccctgagaatccaaaattctccgtgccacctatcacaccccatcctaaagtaaggtcagctaaataagctatcgggcccataccccgaaaatgttggttataccct

SEQ ID NO: 73915 - DNA, 120 bp, Homo sapiens; identical to SEQ ID NO: 58643
  misc_feature: 673 for SV(C|O) and mtDNA

SEQ ID NO: 73916 - DNA, 120 bp, Homo sapiens; identical to SEQ ID NO: 54803
  misc_feature: 673 for SV(C|O) and mtDNA

SEQ ID NO: 73917 - DNA, 120 bp, Homo sapiens
  misc_feature: 673 for SV(C|O) and mtDNA
agcttaacacaaagcacccaacttacacttaggagatttcaacttaacttgaccgctctgagctaaacctagccccaaacccactccaccttactaccagacaaccttagccaaaccatt

SEQ ID NO: 73918 - DNA, 120 bp, Homo sapiens
  misc_feature: 673 for SV(C|O) and mtDNA
agccatttaccgtacatagcacattacagtcaaatcccttctcgtccccatggatgacccccctcagataggggtcccttgaccaccatcctccgtgaaatcaatatcccgcacaagagt

SEQ ID NO: 73919 - DNA, 120 bp, Homo sapiens
  misc_feature: 672 for SV(C|O) and mtDNA
tttttggacaggtggtgtgtggtggccttggtatgtgctttctcgtgttacatcgcgccatcattggtatatggttagtgtgttggttagtaggcctagtatgaggagcgttatggagtg

SEQ ID NO: 73920 - DNA, 120 bp, Homo sapiens
  misc_feature: 672 for SV(C|O) and mtDNA
aatcttcttactcatccgcttccaccccctagcagaaaatagcccactaatccaaactctaacactatgcttaggcgctatcaccactctgttcgcagcagtctgcgcccttacacaaaa

SEQ ID NO: 73921 - DNA, 120 bp, Homo sapiens; identical to SEQ ID NO: 57257
  misc_feature: 672 for SV(C|O) and mtDNA

SEQ ID NO: 73922 - DNA, 120 bp, Homo sapiens; identical to SEQ ID NO: 61270
  misc_feature: 672 for SV(C|O) and mtDNA

SEQ ID NO: 73923 - DNA, 120 bp, Homo sapiens; identical to SEQ ID NO: 57223
  misc_feature: 672 for SV(C|O) and mtDNA

SEQ ID NO: 73924 - DNA, 120 bp, Homo sapiens
  misc_feature: 672 for SV(C|O) and mtDNA
cccccatactccttacactattcctcatcacccaactaaaaatattaaacacaaactaccacctacctccctcaccaaagcccataaaaataaaaaattataacaaaccctgagaaccaa

SEQ ID NO: 73925 - DNA, 120 bp, Homo sapiens
  misc_feature: 672 for SV(C|O) and mtDNA
ctacaaagtaagcgcaagtacccacgtaaagacgttaggtcaaggtgtagcccatgaggtggcaagaaatgggctacattttctaccccagaaaactacgatagcccttatgaaacttaa

SEQ ID NO: 73926 - DNA, 120 bp, Homo sapiens
  misc_feature: 672 for SV(C|O) and mtDNA
aggaatcttcttactcatccgcttccaccccctagcagaaaatagcccactaatccaaactctaacactatgcttaggcgctatcaccactctgttcgcagcagtctgcgcccttacaca

SEQ ID NO: 73927 - DNA, 120 bp, Homo sapiens
  misc_feature: 672 for SV(C|O) and mtDNA
catcgggcgaggcctatattacggatcatttctctactcagaaacctgaaacatcggcattatcctcctgcttgcaactatagcaacagccttcataggctatgtcctcccgtgaggcca

SEQ ID NO: 73928 - DNA, 120 bp, Homo sapiens
  misc_feature: 672 for SV(C|O) and mtDNA
tgctaaatccaccttcgacccttaagtttcataagggctatcgtagttttctggggtagaaaatgtagcccatttcttgccacctcatgggctacaccttgacctaacgtctttacgtgg

SEQ ID NO: 73929 - DNA, 120 bp, Homo sapiens
  misc_feature: 672 for SV(C|O) and mtDNA
tgaaccgaattggtatatagtttaaacaaaacgaatgatttcgactcattaaattatgataatcatatttaccaaatgcccctcatttacataaatattatactagcatttaccatctca

SEQ ID NO: 73930 - DNA, 120 bp, Homo sapiens
  misc_feature: 672 for SV(C|O) and mtDNA
tctccataaaattcttcttagtagctattaccttcttattatttgatctagaaattgccctccttttacccctaccatgagccctacaaacaactaacctaccactaatagttatgtcat

SEQ ID NO: 73931 - DNA, 120 bp, Homo sapiens
  misc_feature: 672 for SV(C|O) and mtDNA
ggcggctatggtataatacgcctcacactcattctcaaccccctgacaaaacacatagcctaccccttccttgtactatccctatgaggcataattataacaagctccatctgcctacga

SEQ ID NO: 73932 - DNA, 120 bp, Homo sapiens
  misc_feature: 672 for SV(C|O) and mtDNA
agatgttagtattagttagttttgttgtgagtgttaggaaaagggcatacaggactaggaagcagataaggaaaatgattatgagggcgtgatcatgaaaggtgataagctcttctatga

SEQ ID NO: 73933 - DNA, 120 bp, Homo sapiens
  misc_feature: 672 for SV(C|O) and mtDNA
tcatactctttcacccacagcaccaatcctacctccatcgctaaccccactaaaacactcaccaagacctcaacccctgacccccatgcctcaggatactcctcaatagccatcgctgta

SEQ ID NO: 73934 - DNA, 120 bp, Homo sapiens
  misc_feature: 672 for SV(C|O) and mtDNA
cttttatttggagttgcaccaaaatttttggggcctaagaccaatggatagctgttatcctttaaaagttgagaaagccatgttgttagacatgggggcatgagttagcagttcttgtga

SEQ ID NO: 73935 - DNA, 120 bp, Homo sapiens
  misc_feature: 672 for SV(C|O) and mtDNA
tattgctatagccattatgattattaatgatgagtattgattggtagtattggttatggttcattgtccggagagtatattgttgaagaggatagctattagaaggattatggatgcggt

SEQ ID NO: 73936 - DNA, 120 bp, Homo sapiens
  misc_feature: 672 for SV(C|O) and mtDNA
accaccaccccatcatactctttcacccacagcaccaatcctacctccatcgctaaccccactaaaacactcaccaagacctcaacccctgacccccatgcctcaggatactcctcaata

SEQ ID NO: 73937 - DNA, 120 bp, Homo sapiens
  misc_feature: 672 for SV(C|O) and mtDNA
tatcaaactcctgagccaacaacttaatatgactagcttacacaatagcttttatagtaaagatacctctttacggactccacttatgactccctaaagcccatgtcgaagcccccatcg

SEQ ID NO: 73938 - DNA, 120 bp, Homo sapiens; identical to SEQ ID NO: 55595
  misc_feature: 672 for SV(C|O) and mtDNA

SEQ ID NO: 73939 - DNA, 120 bp, Homo sapiens; identical to SEQ ID NO: 54553
  misc_feature: 672 for SV(C|O) and mtDNA

SEQ ID NO: 73940 - DNA, 120 bp, Homo sapiens
  misc_feature: 672 for SV(C|O) and mtDNA
atgccctagcccacttcttaccacaaggcacacctacaccccttatccccatactagttattatcgaaaccatcagcctactcattcaaccaatagccctggccgtacgcctaaccgcta

SEQ ID NO: 73941 - DNA, 120 bp, Homo sapiens
  misc_feature: 672 for SV(C|O) and mtDNA
cgcgatagcattgcgagacgctggagccggagcaccctatgtcgcagtatctgtctttgattcctgcctcatcctattatttatcgcacctacgttcaatattacagacgaacatactta

SEQ ID NO: 73942 - DNA, 120 bp, Homo sapiens; identical to SEQ ID NO: 57609
  misc_feature: 672 for SV(C|O) and mtDNA

SEQ ID NO: 73943 - DNA, 120 bp, Homo sapiens
  misc_feature: 672 for SV(C|O) and mtDNA
aaaacccagcccatgacccctaacaggggccctctcagccctcctaatgacctccggcctagccatgtgatttcacttccactccataacgctcctcatactaggcctactaaccaacac

SEQ ID NO: 73944 - DNA, 120 bp, Homo sapiens
  misc_feature: 672 for SV(C|O) and mtDNA
aacaccctcatgttcatacacctatcccccattctcctcctatccctcaaccccgacatcattaccgggttttcctcttgtaaatatagtttaaccaaaacatcagattgtgaatctgac

SEQ ID NO: 73945 - DNA, 120 bp, Homo sapiens; identical to SEQ ID NO: 58836
  misc_feature: 672 for SV(C|O) and mtDNA

SEQ ID NO: 73946 - DNA, 120 bp, Homo sapiens
  misc_feature: 672 for SV(C|O) and mtDNA
ggaagatttataggtagaggcgacaaacctaccgagcctggtgatagctggttgtccaagatagaatcttagttcaactttaaatttgcccacagaaccctctaaatccccttgtaaatt

SEQ ID NO: 73947 - DNA, 120 bp, Homo sapiens
  misc_feature: 672 for SV(C|O) and mtDNA
gctaaatccaccttcgacccttaagtttcataagggctatcgtagttttctggggtagaaaatgtagcccatttcttgccacctcatgggctacaccttgacctaacgtctttacgtggg

SEQ ID NO: 73948 - DNA, 120 bp, Homo sapiens
  misc_feature: 672 for SV(C|O) and mtDNA
aaatgccctagcccacttcttaccacaaggcacacctacaccccttatccccatactagttattatcgaaaccatcagcctactcattcaaccaatagccctggccgtacgcctaaccgc

SEQ ID NO: 73949 - DNA, 120 bp, Homo sapiens
  misc_feature: 672 for SV(C|O) and mtDNA
gccatttaccgtacatagcacattacagtcaaatcccttctcgtccccatggatgacccccctcagataggggtcccttgaccaccatcctccgtgaaatcaatatcccgcacaagagtg

SEQ ID NO: 73950 - DNA, 120 bp, Homo sapiens
  misc_feature: 672 for SV(C|O) and mtDNA
accttactaccagacaaccttagccaaaccatttacccaaataaagtataggcgatagaaattgaaacctggcgcaatagatatagtaccgcaagggaaagatgaaaaattataaccaag

SEQ ID NO: 73951 - DNA, 120 bp, Homo sapiens
  misc_feature: 672 for SV(C|O) and mtDNA
aagccatttaccgtacatagcacattacagtcaaatcccttctcgtccccatggatgacccccctcagataggggtcccttgaccaccatcctccgtgaaatcaatatcccgcacaagag

SEQ ID NO: 73952 - DNA, 120 bp, Homo sapiens
  misc_feature: 672 for SV(C|O) and mtDNA
cgttggggcctttgcgtagttgtatatagcctagaatttttcgttcggtaagcattaggaatgccattgcgattagaatgggtacaatgaggagtaggaggttggccatgggtatgttgt

SEQ ID NO: 73953 - DNA, 120 bp, Homo sapiens
  misc_feature: 672 for SV(C|O) and mtDNA
cgtcaaagtatttagctgactcgccacactccacggaagcaatatgaaatgatctgctgcagtgctctgagccctaggattcatctttcttttcaccgtaggcggcctgactggcattgt

SEQ ID NO: 73954 - DNA, 120 bp, Homo sapiens
  misc_feature: 672 for SV(C|O) and mtDNA
agaggtagagtttttttcgtgatagtggttcactggataagtggcgttggcttgccatgattgtgaggggtaggagtcaggtagttagtattaggaggggggttgttagggggtcggagg

SEQ ID NO: 73955 - DNA, 120 bp, Homo sapiens
  misc_feature: 672 for SV(C|O) and mtDNA
atgatccgtaatataggcctcgcccgatgtgtaggaagaggcagataaagaatattgaggcgccattggcgtgaaggtagcggatgattcagccataatttacgtctcgagtgatgtggg

SEQ ID NO: 73956 - DNA, 120 bp, Homo sapiens; identical to SEQ ID NO: 58640
  misc_feature: 672 for SV(C|O) and mtDNA

SEQ ID NO: 73957 - DNA, 120 bp, Homo sapiens
  misc_feature: 672 for SV(C|O) and mtDNA
accacgtctacaaaatgccagtatcaggcggcggcttcgaagccaaagtgatgtttggatgtaaagtgaaatattagttggcggatgaagcagatagtgaggaaagttgagccaataatg

SEQ ID NO: 73958 - DNA, 120 bp, Homo sapiens; identical to SEQ ID NO: 54487
  misc_feature: 672 for SV(C|O) and mtDNA

SEQ ID NO: 73959 - DNA, 120 bp, Homo sapiens
  misc_feature: 672 for SV(C|O) and mtDNA
acccagcccatgacccctaacaggggccctctcagccctcctaatgacctccggcctagccatgtgatttcacttccactccataacgctcctcatactaggcctactaaccaacacact

SEQ ID NO: 73960 - DNA, 120 bp, Homo sapiens
  misc_feature: 672 for SV(C|O) and mtDNA
aggtccctatttaaggaacaagtgattatgctacctttgcacggttagggtaccgcggccgttaaacatgtgtcactgggcaggcggtgcctctaatactggtgatgctagaggtgatgt

SEQ ID NO: 73961 - DNA, 120 bp, Homo sapiens
  misc_feature: 672 for SV(C|O) and mtDNA
aggcgacagcgatttctaggatagtcagtagaattagaattgtgaagatgataagtgtagagggaaggttaatggttgatattgctagggtggcgcttccaattaggtgcatgagtaggt

SEQ ID NO: 73962 - DNA, 120 bp, Homo sapiens
  misc_feature: 672 for SV(C|O) and mtDNA
actagtataccgctcacacctcatatcctccctactatgcctagaaggaataatactatcactgttcattatagctactctcataaccctcaacacccactccctcttagccaatattgt

SEQ ID NO: 73963 - DNA, 120 bp, Homo sapiens; identical to SEQ ID NO: 52795
  misc_feature: 671 for SV(C|O) and mtDNA

SEQ ID NO: 73964 - DNA, 120 bp, Homo sapiens; identical to SEQ ID NO: 59007
  misc_feature: 671 for SV(C|O) and mtDNA

SEQ ID NO: 73965 - DNA, 120 bp, Homo sapiens
  misc_feature: 671 for SV(C|O) and mtDNA
caccttactaccagacaaccttagccaaaccatttacccaaataaagtataggcgatagaaattgaaacctggcgcaatagatatagtaccgcaagggaaagatgaaaaattataaccaa

SEQ ID NO: 73966 - DNA, 120 bp, Homo sapiens; identical to SEQ ID NO: 59629
  misc_feature: 671 for SV(C|O) and mtDNA

SEQ ID NO: 73967 - DNA, 120 bp, Homo sapiens
  misc_feature: 671 for SV(C|O) and mtDNA
tggagattgtaatgggtatggagacatatcatataagtaatgctagggtgagtggtaggaagttttttcataggaggtgtatgagttggtcgtagcggaatcgggggtatgctgttcgaa

SEQ ID NO: 73968 - DNA, 120 bp, Homo sapiens
  misc_feature: 671 for SV(C|O) and mtDNA
agtcaaatcccttctcgtccccatggatgacccccctcagataggggtcccttgaccaccatcctccgtgaaatcaatatcccgcacaagagtgctactctcctcgctccgggcccataa

SEQ ID NO: 73969 - DNA, 120 bp, Homo sapiens; identical to SEQ ID NO: 60661
  misc_feature: 671 for SV(C|O) and mtDNA

SEQ ID NO: 73970 - DNA, 120 bp, Homo sapiens
  misc_feature: 671 for SV(C|O) and mtDNA
ttacagtcaaatcccttctcgtccccatggatgacccccctcagataggggtcccttgaccaccatcctccgtgaaatcaatatcccgcacaagagtgctactctcctcgctccgggccc

SEQ ID NO: 73971 - DNA, 120 bp, Homo sapiens
  misc_feature: 671 for SV(C|O) and mtDNA
ttaacacaaagcacccaacttacacttaggagatttcaacttaacttgaccgctctgagctaaacctagccccaaacccactccaccttactaccagacaaccttagccaaaccatttac

SEQ ID NO: 73972 - DNA, 120 bp, Homo sapiens
  misc_feature: 671 for SV(C|O) and mtDNA
tggttagtaggcctagtatgaggagcgttatggagtggaagtgaaatcacatggctaggccggaggtcattaggagggctgagagggcccctgttaggggtcatgggctgggttttacta

SEQ ID NO: 73973 - DNA, 120 bp, Homo sapiens; identical to SEQ ID NO: 52354
  misc_feature: 671 for SV(C|O) and mtDNA

SEQ ID NO: 73974 - DNA, 120 bp, Homo sapiens; identical to SEQ ID NO: 55717
  misc_feature: 671 for SV(C|O) and mtDNA

SEQ ID NO: 73975 - DNA, 120 bp, Homo sapiens
  misc_feature: 671 for SV(C|O) and mtDNA
tgccattgcgattagaatgggtacaatgaggagtaggaggttggccatgggtatgttgttaagaagaggaattgaacctctgactgtaaagttttaagttttatgcgattaccgggctct

SEQ ID NO: 73976 - DNA, 120 bp, Homo sapiens
  misc_feature: 671 for SV(C|O) and mtDNA
tgaggatggatagtaatagggcaaggacgcctcctagtttgttagggacggatcggagaattgtgtaggcgaataggaaatatcattcgggcttgatgtggggaggggtgtttaaggggt

SEQ ID NO: 73977 - DNA, 120 bp, Homo sapiens
  misc_feature: 671 for SV(C|O) and mtDNA
tctttcttttcaccgtaggcggcctgactggcattgtattagcaaactcatcactagacatcgtactacacgacacgtactacgttgtagctcacttccactatgtcctatcaataggag

SEQ ID NO: 73978 - DNA, 120 bp, Homo sapiens; identical to SEQ ID NO: 61716
  misc_feature: 671 for SV(C|O) and mtDNA

SEQ ID NO: 73979 - DNA, 120 bp, Homo sapiens
  misc_feature: 671 for SV(C|O) and mtDNA
tcatgttcatacacctatcccccattctcctcctatccctcaaccccgacatcattaccgggttttcctcttgtaaatatagtttaaccaaaacatcagattgtgaatctgacaacagag

SEQ ID NO: 73980 - DNA, 120 bp, Homo sapiens
  misc_feature: 671 for SV(C|O) and mtDNA
tcatctttcttttcaccgtaggcggcctgactggcattgtattagcaaactcatcactagacatcgtactacacgacacgtactacgttgtagctcacttccactatgtcctatcaatag

SEQ ID NO: 73981 - DNA, 120 bp, Homo sapiens
  misc_feature: 671 for SV(C|O) and mtDNA
tcacctctagcatcaccagtattagaggcaccgcctgcccagtgacacatgtttaacggccgcggtaccctaaccgtgcaaaggtagcataatcacttgttccttaaatagggacctgta

SEQ ID NO: 73982 - DNA, 120 bp, Homo sapiens; identical to SEQ ID NO: 57742
  misc_feature: 671 for SV(C|O) and mtDNA

SEQ ID NO: 73983 - DNA, 120 bp, Homo sapiens
  misc_feature: 671 for SV(C|O) and mtDNA
tagaataggattgcgctgttatccctagggtaacttgttccgttggtcaagttattggatcaattgagtatagtagttcgctttgactggtgaagtcttagcatgtactgctcggaggtt

SEQ ID NO: 73984 - DNA, 120 bp, Homo sapiens
  misc_feature: 671 for SV(C|O) and mtDNA
taacaaactaggaggcgtccttgccctattactatccatcctcatcctagcaataatccccatcctccatatatccaaacaacaaagcataatatttcgcccactaagccaatcacttta

SEQ ID NO: 73985 - DNA, 120 bp, Homo sapiens; identical to SEQ ID NO: 57490
  misc_feature: 671 for SV(C|O) and mtDNA

SEQ ID NO: 73986 - DNA, 120 bp, Homo sapiens; identical to SEQ ID NO: 62523
  misc_feature: 671 for SV(C|O) and mtDNA

SEQ ID NO: 73987 - DNA, 120 bp, Homo sapiens
  misc_feature: 671 for SV(C|O) and mtDNA
acgaccaatgatatgaaaaaccatcgttgtatttcaactacaagaacaccaatgaccccaatacgcaaaattaaccccctaataaaattaattaaccactcattcatcgacctccccacc

SEQ ID NO: 73988 - DNA, 120 bp, Homo sapiens
  misc_feature: 671 for SV(C|O) and mtDNA
gggaagatttataggtagaggcgacaaacctaccgagcctggtgatagctggttgtccaagatagaatcttagttcaactttaaatttgcccacagaaccctctaaatccccttgtaaat

SEQ ID NO: 73989 - DNA, 120 bp, Homo sapiens
  misc_feature: 671 for SV(C|O) and mtDNA
ggctacaaagtaagcgcaagtacccacgtaaagacgttaggtcaaggtgtagcccatgaggtggcaagaaatgggctacattttctaccccagaaaactacgatagcccttatgaaactt

SEQ ID NO: 73990 - DNA, 120 bp, Homo sapiens
  misc_feature: 671 for SV(C|O) and mtDNA
ggaggaaaaggttggggaacagctaaataggttgttgttgatttggttaaaaaatagtagagggatgatgctaataattaggctgtgggtggttgtgttgattcaaattatgtgtttttt

SEQ ID NO: 73991 - DNA, 120 bp, Homo sapiens; identical to SEQ ID NO: 56548
  misc_feature: 671 for SV(C|O) and mtDNA

SEQ ID NO: 73992 - DNA, 120 bp, Homo sapiens
  misc_feature: 671 for SV(C|O) and mtDNA
cattacagtcaaatcccttctcgtccccatggatgacccccctcagataggggtcccttgaccaccatcctccgtgaaatcaatatcccgcacaagagtgctactctcctcgctccgggc

SEQ ID NO: 73993 - DNA, 120 bp, Homo sapiens
  misc_feature: 671 for SV(C|O) and mtDNA
attgcgctgttatccctagggtaacttgttccgttggtcaagttattggatcaattgagtatagtagttcgctttgactggtgaagtcttagcatgtactgctcggaggttgggttctgc

SEQ ID NO: 73994 - DNA, 120 bp, Homo sapiens
  misc_feature: 671 for SV(C|O) and mtDNA
ataaaatccccactatgcacattttatttctccaacatactcggattctaccctaccatcacacaccgcacaatcccctatctaggccttcttacgagccaaaacctgcccctactcctc

SEQ ID NO: 73995 - DNA, 120 bp, Homo sapiens
  misc_feature: 671 for SV(C|O) and mtDNA
ctaccgagcctggtgatagctggttgtccaagatagaatcttagttcaactttaaatttgcccacagaaccctctaaatccccttgtaaatttaactgttagtccaaagaggaacagctc

SEQ ID NO: 73996 - DNA, 120 bp, Homo sapiens
  misc_feature: 671 for SV(C|O) and mtDNA
agcttatcacctttcatgatcacgccctcataatcattttccttatctgcttcctagtcctgtatgcccttttcctaacactcacaacaaaactaactaatactaacatctcagacgctc

SEQ ID NO: 73997 - DNA, 120 bp, Homo sapiens
  misc_feature: 671 for SV(C|O) and mtDNA
gagatgttagtattagttagttttgttgtgagtgttaggaaaagggcatacaggactaggaagcagataaggaaaatgattatgagggcgtgatcatgaaaggtgataagctcttctatg

SEQ ID NO: 73998 - DNA, 120 bp, Homo sapiens; identical to SEQ ID NO: 57464
  misc_feature: 671 for SV(C|O) and mtDNA

SEQ ID NO: 73999 - DNA, 120 bp, Homo sapiens
  misc_feature: 671 for SV(C|O) and mtDNA
aggcctcgcccgatgtgtaggaagaggcagataaagaatattgaggcgccattggcgtgaaggtagcggatgattcagccataatttacgtctcgagtgatgtgggcgattgatgaaaag

SEQ ID NO: 74000 - DNA, 120 bp, Homo sapiens; identical to SEQ ID NO: 52592
  misc_feature: 671 for SV(C|O) and mtDNA

SEQ ID NO: 74001 - DNA, 120 bp, Homo sapiens; identical to SEQ ID NO: 55009
  misc_feature: 671 for SV(C|O) and mtDNA

SEQ ID NO: 74002 - DNA, 120 bp, Homo sapiens
  misc_feature: 671 for SV(C|O) and mtDNA
attatgcttggttataatttttcatctttcccttgcggtactatatctattgcgccaggtttcaatttctatcgcctatactttatttgggtaaatggtttggctaaggttgtctggtag

SEQ ID NO: 74003 - DNA, 120 bp, Homo sapiens
  misc_feature: 671 for SV(C|O) and mtDNA
cggcgtcaaagtatttagctgactcgccacactccacggaagcaatatgaaatgatctgctgcagtgctctgagccctaggattcatctttcttttcaccgtaggcggcctgactggcat

SEQ ID NO: 74004 - DNA, 120 bp, Homo sapiens; identical to SEQ ID NO: 59991
  misc_feature: 671 for SV(C|O) and mtDNA

SEQ ID NO: 74005 - DNA, 120 bp, Homo sapiens
  misc_feature: 671 for SV(C|O) and mtDNA
agcgattttaggtctgtttgtcgtaggcagatggagcttgttataattatgcctcatagggatagtacaaggaaggggtaggctatgtgttttgtcagggggttgagaatgagtgtgagg

SEQ ID NO: 74006 - DNA, 120 bp, Homo sapiens; identical to SEQ ID NO: 54379
  misc_feature: 671 for SV(C|O) and mtDNA

SEQ ID NO: 74007 - DNA, 120 bp, Homo sapiens
  misc_feature: 671 for SV(C|O) and mtDNA
aagtattgcaacttactgagggctttgaaggctcttggtctgtatttaacctaaatttctataagattattagtataaaaggggagataggtaggagtagcgtggtaagggcgatgagtg

SEQ ID NO: 74008 - DNA, 120 bp, Homo sapiens
  misc_feature: 671 for SV(C|O) and mtDNA
cacctctagcatcaccagtattagaggcaccgcctgcccagtgacacatgtttaacggccgcggtaccctaaccgtgcaaaggtagcataatcacttgttccttaaatagggacctgtat

SEQ ID NO: 74009 - DNA, 120 bp, Homo sapiens
  misc_feature: 671 for SV(C|O) and mtDNA
cacaacaatcctaatcctaataccaactatctccctaattgaaaacaaaatactcaaatgggcctgtccttgtagtataaactaatacaccagtcttgtaaaccggagatgaaaaccttt

SEQ ID NO: 74010 - DNA, 120 bp, Homo sapiens
  misc_feature: 671 for SV(C|O) and mtDNA
atgcatcggggtagtccgagtaacgtcggggcattccggataggccgagaaagtgttgtgggaagaaagttagatttacgccgatgaatatgatagtgaaatggattttggcgtaggttt

SEQ ID NO: 74011 - DNA, 120 bp, Homo sapiens
  misc_feature: 670 for SV(C|O) and mtDNA
tttttcgtgatagtggttcactggataagtggcgttggcttgccatgattgtgaggggtaggagtcaggtagttagtattaggaggggggttgttagggggtcggaggaaaaggttgggg

SEQ ID NO: 74012 - DNA, 120 bp, Homo sapiens
  misc_feature: 670 for SV(C|O) and mtDNA
ttggtatatagtttaaacaaaacgaatgatttcgactcattaaattatgataatcatatttaccaaatgcccctcatttacataaatattatactagcatttaccatctcacttctagga

SEQ ID NO: 74013 - DNA, 120 bp, Homo sapiens; identical to SEQ ID NO: 59542
  misc_feature: 670 for SV(C|O) and mtDNA

SEQ ID NO: 74014 - DNA, 120 bp, Homo sapiens; identical to SEQ ID NO: 52374
  misc_feature: 670 for SV(C|O) and mtDNA

SEQ ID NO: 74015 - DNA, 120 bp, Homo sapiens
  misc_feature: 670 for SV(C|O) and mtDNA
aaatcagtgaatgaagcctcctatgatggcaaatacagctcctattgataggacatagtggaagtgagctacaacgtagtacgtgtcgtgtagtacgatgtctagtgatgagtttgctaa

SEQ ID NO: 74016 - DNA, 120 bp, Homo sapiens
  misc_feature: 670 for SV(C|O) and mtDNA
aaacccagcccatgacccctaacaggggccctctcagccctcctaatgacctccggcctagccatgtgatttcacttccactccataacgctcctcatactaggcctactaaccaacaca

SEQ ID NO: 74017 - DNA, 120 bp, Homo sapiens
  misc_feature: 670 for SV(C|O) and mtDNA
tgtatatattgtaattgagattgctcgggggaataggttatgtgattaggagtagggttaggatgagtgggaagaagaaagagaggaagtaaagtttaattatgcctttttgggttgagg

SEQ ID NO: 74018 - DNA, 120 bp, Homo sapiens; identical to SEQ ID NO: 52881
  misc_feature: 670 for SV(C|O) and mtDNA

SEQ ID NO: 74019 - DNA, 120 bp, Homo sapiens
  misc_feature: 670 for SV(C|O) and mtDNA
cagctgacacaaaatagactacgaaagtggctttaacatatctgaacacacaatagctaagacccaaactgggattagataccccactatgcttagccctaaacctcaacagttaaatca

SEQ ID NO: 74020 - DNA, 120 bp, Homo sapiens; identical to SEQ ID NO: 55316
  misc_feature: 670 for SV(C|O) and mtDNA

SEQ ID NO: 74021 - DNA, 120 bp, Homo sapiens
  misc_feature: 670 for SV(C|O) and mtDNA
tcccccttccaaacaacaatccccctctacctaaaactcacagccctcgctgtcactttcctaggacttctaacagccctagacctcaactacctaaccaacaaacttaaaataaaatcc

SEQ ID NO: 74022 - DNA, 120 bp, Homo sapiens
  misc_feature: 670 for SV(C|O) and mtDNA
tccacctcaatcacactactccccatatctaacaacgtaaaaataaaatgacagtttgaacatacaaaacccaccccattcctccccacactcatcgcccttaccacgctactcctacct

SEQ ID NO: 74023 - DNA, 120 bp, Homo sapiens
  misc_feature: 670 for SV(C|O) and mtDNA
ccacgtctacaaaatgccagtatcaggcggcggcttcgaagccaaagtgatgtttggatgtaaagtgaaatattagttggcggatgaagcagatagtgaggaaagttgagccaataatga

SEQ ID NO: 74024 - DNA, 120 bp, Homo sapiens; identical to SEQ ID NO: 58452
  misc_feature: 670 for SV(C|O) and mtDNA

SEQ ID NO: 74025 - DNA, 120 bp, Homo sapiens
  misc_feature: 670 for SV(C|O) and mtDNA
gttcttgtgagctttctcggtaaataaggggtcgtaagcctctgttgtcagattcacaatctgatgttttggttaaactatatttacaagaggaaaacccggtaatgatgtcggggttga

SEQ ID NO: 74026 - DNA, 120 bp, Homo sapiens; identical to SEQ ID NO: 57867
  misc_feature: 670 for SV(C|O) and mtDNA

SEQ ID NO: 74027 - DNA, 120 bp, Homo sapiens; identical to SEQ ID NO: 59639
  misc_feature: 670 for SV(C|O) and mtDNA

SEQ ID NO: 74028 - DNA, 120 bp, Homo sapiens; identical to SEQ ID NO: 58169
  misc_feature: 670 for SV(C|O) and mtDNA

SEQ ID NO: 74029 - DNA, 120 bp, Homo sapiens; identical to SEQ ID NO: 56802
  misc_feature: 670 for SV(C|O) and mtDNA

SEQ ID NO: 74030 - DNA, 120 bp, Homo sapiens
  misc_feature: 670 for SV(C|O) and mtDNA
tagttcttgggcagtgagagtgagtagtagaatgtttagtgagcctagggtgttgtgagtgtaaattagtgcgatgagtaggggaagggagcctactagggtgtagaataggaagtatgt

SEQ ID NO: 74031 - DNA, 120 bp, Homo sapiens; identical to SEQ ID NO: 61258
  misc_feature: 670 for SV(C|O) and mtDNA

SEQ ID NO: 74032 - DNA, 120 bp, Homo sapiens; identical to SEQ ID NO: 53542
  misc_feature: 670 for SV(C|O) and mtDNA

SEQ ID NO: 74033 - DNA, 120 bp, Homo sapiens; identical to SEQ ID NO: 58986
  misc_feature: 670 for SV(C|O) and mtDNA

SEQ ID NO: 74034 - DNA, 120 bp, Homo sapiens; identical to SEQ ID NO: 56702
  misc_feature: 670 for SV(C|O) and mtDNA

SEQ ID NO: 74035 - DNA, 120 bp, Homo sapiens; identical to SEQ ID NO: 59430
  misc_feature: 670 for SV(C|O) and mtDNA

SEQ ID NO: 74036 - DNA, 120 bp, Homo sapiens
  misc_feature: 670 for SV(C|O) and mtDNA
gacactaggaaaaaaccttgtagagagagtaaaaaatttaacacccatagtaggcctaaaagcagccaccaattaagaaagcgttcaagctcaacacccactacctaaaaaatcccaaac

SEQ ID NO: 74037 - DNA, 120 bp, Homo sapiens; identical to SEQ ID NO: 61654
  misc_feature: 670 for SV(C|O) and mtDNA

SEQ ID NO: 74038 - DNA, 120 bp, Homo sapiens; identical to SEQ ID NO: 56541
  misc_feature: 670 for SV(C|O) and mtDNA

SEQ ID NO: 74039 - DNA, 120 bp, Homo sapiens; identical to SEQ ID NO: 57808
  misc_feature: 670 for SV(C|O) and mtDNA

SEQ ID NO: 74040 - DNA, 120 bp, Homo sapiens; identical to SEQ ID NO: 57449
  misc_feature: 670 for SV(C|O) and mtDNA

SEQ ID NO: 74041 - DNA, 120 bp, Homo sapiens
  misc_feature: 670 for SV(C|O) and mtDNA
gtactcttaaaactaggcggctatggtataatacgcctcacactcattctcaaccccctgacaaaacacatagcctaccccttccttgtactatccctatgaggcataattataacaagc

SEQ ID NO: 74042 - DNA, 120 bp, Homo sapiens; identical to SEQ ID NO: 60619
  misc_feature: 670 for SV(C|O) and mtDNA

SEQ ID NO: 74043 - DNA, 120 bp, Homo sapiens
  misc_feature: 670 for SV(C|O) and mtDNA
ctacaaccacgaccaatgatatgaaaaaccatcgttgtatttcaactacaagaacaccaatgaccccaatacgcaaaattaaccccctaataaaattaattaaccactcattcatcgacc

SEQ ID NO: 74044 - DNA, 120 bp, Homo sapiens
  misc_feature: 670 for SV(C|O) and mtDNA
aaccacgaccaatgatatgaaaaaccatcgttgtatttcaactacaagaacaccaatgaccccaatacgcaaaattaaccccctaataaaattaattaaccactcattcatcgacctccc

SEQ ID NO: 74045 - DNA, 120 bp, Homo sapiens
  misc_feature: 670 for SV(C|O) and mtDNA
ggctcattcatttctctaacagcagtaatattaataattttcatgatttgagaagccttcgcttcgaagcgaaaagtcctaatagtagaagaaccctccataaacctggagtgactatat

SEQ ID NO: 74046 - DNA, 120 bp, Homo sapiens
  misc_feature: 670 for SV(C|O) and mtDNA
ggctatgtgttttgtcagggggttgagaatgagtgtgaggcgtattataccatagccgcctagttttaagagtactgcggcaagtactattgacccagcgatgggggcttcgacatgggc

SEQ ID NO: 74047 - DNA, 120 bp, Homo sapiens
  misc_feature: 670 for SV(C|O) and mtDNA
gcgattttaggtctgtttgtcgtaggcagatggagcttgttataattatgcctcatagggatagtacaaggaaggggtaggctatgtgttttgtcagggggttgagaatgagtgtgaggc

SEQ ID NO: 74048 - DNA, 120 bp, Homo sapiens; identical to SEQ ID NO: 59411
  misc_feature: 670 for SV(C|O) and mtDNA

SEQ ID NO: 74049 - DNA, 120 bp, Homo sapiens
  misc_feature: 670 for SV(C|O) and mtDNA
ccatttaccgtacatagcacattacagtcaaatcccttctcgtccccatggatgacccccctcagataggggtcccttgaccaccatcctccgtgaaatcaatatcccgcacaagagtgc

SEQ ID NO: 74050 - DNA, 120 bp, Homo sapiens
  misc_feature: 670 for SV(C|O) and mtDNA
catgcccgcctcttcacgggcaggtcaatttcactggttaaaagtaagagacagctgaaccctcgtggagccattcatacaggtccctatttaaggaacaagtgattatgctacctttgc

SEQ ID NO: 74051 - DNA, 120 bp, Homo sapiens
  misc_feature: 670 for SV(C|O) and mtDNA
gagtttttttcgtgatagtggttcactggataagtggcgttggcttgccatgattgtgaggggtaggagtcaggtagttagtattaggaggggggttgttagggggtcggaggaaaaggt

SEQ ID NO: 74052 - DNA, 120 bp, Homo sapiens
  misc_feature: 670 for SV(C|O) and mtDNA
gagattgtaatgggtatggagacatatcatataagtaatgctagggtgagtggtaggaagttttttcataggaggtgtatgagttggtcgtagcggaatcgggggtatgctgttcgaatt

SEQ ID NO: 74053 - DNA, 120 bp, Homo sapiens
  misc_feature: 670 for SV(C|O) and mtDNA
ccgaattggtatatagtttaaacaaaacgaatgatttcgactcattaaattatgataatcatatttaccaaatgcccctcatttacataaatattatactagcatttaccatctcacttc

SEQ ID NO: 74054 - DNA, 120 bp, Homo sapiens; identical to SEQ ID NO: 55845
  misc_feature: 670 for SV(C|O) and mtDNA

SEQ ID NO: 74055 - DNA, 120 bp, Homo sapiens
  misc_feature: 670 for SV(C|O) and mtDNA
ccaatgatatgaaaaaccatcgttgtatttcaactacaagaacaccaatgaccccaatacgcaaaattaaccccctaataaaattaattaaccactcattcatcgacctccccaccccat

SEQ ID NO: 74056 - DNA, 120 bp, Homo sapiens
  misc_feature: 670 for SV(C|O) and mtDNA
atagttcttgggcagtgagagtgagtagtagaatgtttagtgagcctagggtgttgtgagtgtaaattagtgcgatgagtaggggaagggagcctactagggtgtagaataggaagtatg

SEQ ID NO: 74057 - DNA, 120 bp, Homo sapiens
  misc_feature: 670 for SV(C|O) and mtDNA
caacgttggggcctttgcgtagttgtatatagcctagaatttttcgttcggtaagcattaggaatgccattgcgattagaatgggtacaatgaggagtaggaggttggccatgggtatgt

SEQ ID NO: 74058 - DNA, 120 bp, Homo sapiens
  misc_feature: 670 for SV(C|O) and mtDNA
agcagatgccaacacagcagccattcaagcaatcctatacaaccgtatcggcgatatcggtttcatcctcgccttagcatgatttatcctacactccaactcatgagacccacaacaaat

SEQ ID NO: 74059 - DNA, 120 bp, Homo sapiens; identical to SEQ ID NO: 55401
  misc_feature: 669 for SV(C|O) and mtDNA

SEQ ID NO: 74060 - DNA, 120 bp, Homo sapiens
  misc_feature: 669 for SV(C|O) and mtDNA
tggacactaggaaaaaaccttgtagagagagtaaaaaatttaacacccatagtaggcctaaaagcagccaccaattaagaaagcgttcaagctcaacacccactacctaaaaaatcccaa

SEQ ID NO: 74061 - DNA, 120 bp, Homo sapiens
  misc_feature: 669 for SV(C|O) and mtDNA
ctccctcttagccaatattgtgcctattgccatactagtctttgccgcctgcgaagcagcggtgggcctagccctactagtctcaatctccaacacatatggcctagactacgtacataa

SEQ ID NO: 74062 - DNA, 120 bp, Homo sapiens; identical to SEQ ID NO: 54779
  misc_feature: 669 for SV(C|O) and mtDNA

SEQ ID NO: 74063 - DNA, 120 bp, Homo sapiens
  misc_feature: 669 for SV(C|O) and mtDNA
tgtggtgtatgcatcggggtagtccgagtaacgtcggggcattccggataggccgagaaagtgttgtgggaagaaagttagatttacgccgatgaatatgatagtgaaatggattttggc

SEQ ID NO: 74064 - DNA, 120 bp, Homo sapiens; identical to SEQ ID NO: 57476
  misc_feature: 669 for SV(C|O) and mtDNA

SEQ ID NO: 74065 - DNA, 120 bp, Homo sapiens
  misc_feature: 669 for SV(C|O) and mtDNA
ccaccttactaccagacaaccttagccaaaccatttacccaaataaagtataggcgatagaaattgaaacctggcgcaatagatatagtaccgcaagggaaagatgaaaaattataacca

SEQ ID NO: 74066 - DNA, 120 bp, Homo sapiens
  misc_feature: 669 for SV(C|O) and mtDNA
tggggtatctaatcccagtttgggtcttagctattgtgtgttcagatatgttaaagccactttcgtagtctattttgtgtcagctggagttttttacaactcaggtgagttttagcttta

SEQ ID NO: 74067 - DNA, 120 bp, Homo sapiens; identical to SEQ ID NO: 57663
  misc_feature: 669 for SV(C|O) and mtDNA

SEQ ID NO: 74068 - DNA, 120 bp, Homo sapiens
  misc_feature: 669 for SV(C|O) and mtDNA
cttatccagtgaaccactatcacgaaaaaaactctacctctctatactaatctccctacaaatctccttaattataacattcacagccacagaactaatcatattttatatcttcttcga

SEQ ID NO: 74069 - DNA, 120 bp, Homo sapiens
  misc_feature: 669 for SV(C|O) and mtDNA
tcaacccaaaaaggcataattaaactttacttcctctctttcttcttcccactcatcctaaccctactcctaatcacataacctattcccccgagcaatctcaattacaatatatacacc

SEQ ID NO: 74070 - DNA, 120 bp, Homo sapiens
  misc_feature: 669 for SV(C|O) and mtDNA
aggctcattcatttctctaacagcagtaatattaataattttcatgatttgagaagccttcgcttcgaagcgaaaagtcctaatagtagaagaaccctccataaacctggagtgactata

SEQ ID NO: 74071 - DNA, 120 bp, Homo sapiens; identical to SEQ ID NO: 60668
  misc_feature: 669 for SV(C|O) and mtDNA

SEQ ID NO: 74072 - DNA, 120 bp, Homo sapiens
  misc_feature: 669 for SV(C|O) and mtDNA
tagagtttttttcgtgatagtggttcactggataagtggcgttggcttgccatgattgtgaggggtaggagtcaggtagttagtattaggaggggggttgttagggggtcggaggaaaag

SEQ ID NO: 74073 - DNA, 120 bp, Homo sapiens; identical to SEQ ID NO: 58416
  misc_feature: 669 for SV(C|O) and mtDNA

SEQ ID NO: 74074 - DNA, 120 bp, Homo sapiens
  misc_feature: 669 for SV(C|O) and mtDNA
taaaatccccactatgcacattttatttctccaacatactcggattctaccctaccatcacacaccgcacaatcccctatctaggccttcttacgagccaaaacctgcccctactcctcc

SEQ ID NO: 74075 - DNA, 120 bp, Homo sapiens
  misc_feature: 669 for SV(C|O) and mtDNA
gtcgtaaaccctattgttgatatggactctagaataggattgcgctgttatccctagggtaacttgttccgttggtcaagttattggatcaattgagtatagtagttcgctttgactggt

SEQ ID NO: 74076 - DNA, 120 bp, Homo sapiens
  misc_feature: 669 for SV(C|O) and mtDNA
gtatagagaggtagagtttttttcgtgatagtggttcactggataagtggcgttggcttgccatgattgtgaggggtaggagtcaggtagttagtattaggaggggggttgttagggggt

SEQ ID NO: 74077 - DNA, 120 bp, Homo sapiens; identical to SEQ ID NO: 57015
  misc_feature: 669 for SV(C|O) and mtDNA

SEQ ID NO: 74078 - DNA, 120 bp, Homo sapiens; identical to SEQ ID NO: 52999
  misc_feature: 669 for SV(C|O) and mtDNA

SEQ ID NO: 74079 - DNA, 120 bp, Homo sapiens
  misc_feature: 669 for SV(C|O) and mtDNA
ggcgtcagcgaagggttgtagtagcccgtaggggcctacaacgttggggcctttgcgtagttgtatatagcctagaatttttcgttcggtaagcattaggaatgccattgcgattagaat

SEQ ID NO: 74080 - DNA, 120 bp, Homo sapiens
  misc_feature: 669 for SV(C|O) and mtDNA
agtataccgctcacacctcatatcctccctactatgcctagaaggaataatactatcactgttcattatagctactctcataaccctcaacacccactccctcttagccaatattgtgcc

SEQ ID NO: 74081 - DNA, 120 bp, Homo sapiens
  misc_feature: 669 for SV(C|O) and mtDNA
ggattgcgctgttatccctagggtaacttgttccgttggtcaagttattggatcaattgagtatagtagttcgctttgactggtgaagtcttagcatgtactgctcggaggttgggttct

SEQ ID NO: 74082 - DNA, 120 bp, Homo sapiens
  misc_feature: 669 for SV(C|O) and mtDNA
ggagattgtaatgggtatggagacatatcatataagtaatgctagggtgagtggtaggaagttttttcataggaggtgtatgagttggtcgtagcggaatcgggggtatgctgttcgaat

SEQ ID NO: 74083 - DNA, 120 bp, Homo sapiens
  misc_feature: 669 for SV(C|O) and mtDNA
gctcactcacccaccacattaacaacataaaaccctcattcacacgagaaaacaccctcatgttcatacacctatcccccattctcctcctatccctcaaccccgacatcattaccgggt

SEQ ID NO: 74084 - DNA, 120 bp, Homo sapiens
  misc_feature: 669 for SV(C|O) and mtDNA
aggataacagctatccattggtcttaggccccaaaaattttggtgcaactccaaataaaagtaacaaccatgcacactactataaccaccctaaccctgacttccctaattccccccatc

SEQ ID NO: 74085 - DNA, 120 bp, Homo sapiens
  misc_feature: 669 for SV(C|O) and mtDNA
acatcactcgagacgtaaattatggctgaatcatccgctaccttcacgccaatggcgcctcaatattctttatctgcctcttcctacacatcgggcgaggcctatattacggatcatttc

SEQ ID NO: 74086 - DNA, 120 bp, Homo sapiens; identical to SEQ ID NO: 58395
  misc_feature: 669 for SV(C|O) and mtDNA

SEQ ID NO: 74087 - DNA, 120 bp, Homo sapiens
  misc_feature: 669 for SV(C|O) and mtDNA
aggctatgtgttttgtcagggggttgagaatgagtgtgaggcgtattataccatagccgcctagttttaagagtactgcggcaagtactattgacccagcgatgggggcttcgacatggg

SEQ ID NO: 74088 - DNA, 120 bp, Homo sapiens
  misc_feature: 669 for SV(C|O) and mtDNA
agtggttcactggataagtggcgttggcttgccatgattgtgaggggtaggagtcaggtagttagtattaggaggggggttgttagggggtcggaggaaaaggttggggaacagctaaat

SEQ ID NO: 74089 - DNA, 120 bp, Homo sapiens
  misc_feature: 669 for SV(C|O) and mtDNA
attcatctttcttttcaccgtaggcggcctgactggcattgtattagcaaactcatcactagacatcgtactacacgacacgtactacgttgtagctcacttccactatgtcctatcaat

SEQ ID NO: 74090 - DNA, 120 bp, Homo sapiens; identical to SEQ ID NO: 58309
  misc_feature: 669 for SV(C|O) and mtDNA

SEQ ID NO: 74091 - DNA, 120 bp, Homo sapiens; identical to SEQ ID NO: 59336
  misc_feature: 669 for SV(C|O) and mtDNA

SEQ ID NO: 74092 - DNA, 120 bp, Homo sapiens
  misc_feature: 669 for SV(C|O) and mtDNA
aaaatagagacccagtaaaattgtaataagcagtgcttgaattatttggtttcggttgttttctattagactatggtgagctcaggtgattgatactcctgatgcgagtaatacggatgt

SEQ ID NO: 74093 - DNA, 120 bp, Homo sapiens
  misc_feature: 669 for SV(C|O) and mtDNA
aatcccttctcgtccccatggatgacccccctcagataggggtcccttgaccaccatcctccgtgaaatcaatatcccgcacaagagtgctactctcctcgctccgggcccataacactt

SEQ ID NO: 74094 - DNA, 120 bp, Homo sapiens
  misc_feature: 668 for SV(C|O) and mtDNA
ctactagtctcaatctccaacacatatggcctagactacgtacataacctaaacctactccaatgctaaaactaatcgtcccaacaattatattactaccactgacatgactttccaaaa

SEQ ID NO: 74095 - DNA, 120 bp, Homo sapiens
  misc_feature: 668 for SV(C|O) and mtDNA
gaatcttcttactcatccgcttccaccccctagcagaaaatagcccactaatccaaactctaacactatgcttaggcgctatcaccactctgttcgcagcagtctgcgcccttacacaaa

SEQ ID NO: 74096 - DNA, 120 bp, Homo sapiens
  misc_feature: 668 for SV(C|O) and mtDNA
tcgggcgaggcctatattacggatcatttctctactcagaaacctgaaacatcggcattatcctcctgcttgcaactatagcaacagccttcataggctatgtcctcccgtgaggccaaa

SEQ ID NO: 74097 - DNA, 120 bp, Homo sapiens
  misc_feature: 668 for SV(C|O) and mtDNA
cctactagtctcaatctccaacacatatggcctagactacgtacataacctaaacctactccaatgctaaaactaatcgtcccaacaattatattactaccactgacatgactttccaaa

SEQ ID NO: 74098 - DNA, 120 bp, Homo sapiens; identical to SEQ ID NO: 61429
  misc_feature: 668 for SV(C|O) and mtDNA

SEQ ID NO: 74099 - DNA, 120 bp, Homo sapiens; identical to SEQ ID NO: 55959
  misc_feature: 668 for SV(C|O) and mtDNA

SEQ ID NO: 74100 - DNA, 120 bp, Homo sapiens
  misc_feature: 668 for SV(C|O) and mtDNA
gattcatctttcttttcaccgtaggcggcctgactggcattgtattagcaaactcatcactagacatcgtactacacgacacgtactacgttgtagctcacttccactatgtcctatcaa

SEQ ID NO: 74101 - DNA, 120 bp, Homo sapiens
  misc_feature: 668 for SV(C|O) and mtDNA
ttcttgtgagctttctcggtaaataaggggtcgtaagcctctgttgtcagattcacaatctgatgttttggttaaactatatttacaagaggaaaacccggtaatgatgtcggggttgag

SEQ ID NO: 74102 - DNA, 120 bp, Homo sapiens; identical to SEQ ID NO: 56599
  misc_feature: 668 for SV(C|O) and mtDNA

SEQ ID NO: 74103 - DNA, 120 bp, Homo sapiens
  misc_feature: 668 for SV(C|O) and mtDNA
ctctagcatcaccagtattagaggcaccgcctgcccagtgacacatgtttaacggccgcggtaccctaaccgtgcaaaggtagcataatcacttgttccttaaatagggacctgtatgaa

SEQ ID NO: 74104 - DNA, 120 bp, Homo sapiens
  misc_feature: 668 for SV(C|O) and mtDNA
ttcaaattcctccctgtacgaaaggacaagagaaataaggcctacttcacaaagcgccttcccccgtaaatgatatcatctcaacttagtattatacccacacccacccaagaacagggt

SEQ ID NO: 74105 - DNA, 120 bp, Homo sapiens; identical to SEQ ID NO: 54250
  misc_feature: 668 for SV(C|O) and mtDNA

SEQ ID NO: 74106 - DNA, 120 bp, Homo sapiens; identical to SEQ ID NO: 60456
  misc_feature: 668 for SV(C|O) and mtDNA

SEQ ID NO: 74107 - DNA, 120 bp, Homo sapiens
  misc_feature: 668 for SV(C|O) and mtDNA
atgatatgaaaaaccatcgttgtatttcaactacaagaacaccaatgaccccaatacgcaaaattaaccccctaataaaattaattaaccactcattcatcgacctccccaccccatcca

SEQ ID NO: 74108 - DNA, 120 bp, Homo sapiens
  misc_feature: 668 for SV(C|O) and mtDNA
tgattcgggaggatcctattggtgcgggggctttgtatgattatgggcgttgattagtagtagttactggttgaacattgtttgttggtgtatatattgtaattgagattgctcggggga

SEQ ID NO: 74109 - DNA, 120 bp, Homo sapiens; identical to SEQ ID NO: 56485
  misc_feature: 668 for SV(C|O) and mtDNA

SEQ ID NO: 74110 - DNA, 120 bp, Homo sapiens; identical to SEQ ID NO: 59191
  misc_feature: 668 for SV(C|O) and mtDNA

SEQ ID NO: 74111 - DNA, 120 bp, Homo sapiens
  misc_feature: 668 for SV(C|O) and mtDNA
cccatttcttgccacctcatgggctacaccttgacctaacgtctttacgtgggtacttgcgcttactttgtagccttcatcagggtttgctgaagatggcggtatataggctgagcaaga

SEQ ID NO: 74112 - DNA, 120 bp, Homo sapiens; identical to SEQ ID NO: 59844
  misc_feature: 668 for SV(C|O) and mtDNA

SEQ ID NO: 74113 - DNA, 120 bp, Homo sapiens
  misc_feature: 668 for SV(C|O) and mtDNA
tcgcttcgaagcgaaggcttctcaaatcatgaaaattattaatattactgctgttagagaaatgaatgagcctacagatgataggatgtttcatgtggtgtatgcatcggggtagtccga

SEQ ID NO: 74114 - DNA, 120 bp, Homo sapiens
  misc_feature: 668 for SV(C|O) and mtDNA
actaggaaaaaaccttgtagagagagtaaaaaatttaacacccatagtaggcctaaaagcagccaccaattaagaaagcgttcaagctcaacacccactacctaaaaaatcccaaacata

SEQ ID NO: 74115 - DNA, 120 bp, Homo sapiens
  misc_feature: 668 for SV(C|O) and mtDNA
actccctcttagccaatattgtgcctattgccatactagtctttgccgcctgcgaagcagcggtgggcctagccctactagtctcaatctccaacacatatggcctagactacgtacata

SEQ ID NO: 74116 - DNA, 120 bp, Homo sapiens
  misc_feature: 668 for SV(C|O) and mtDNA
tatattgtaattgagattgctcgggggaataggttatgtgattaggagtagggttaggatgagtgggaagaagaaagagaggaagtaaagtttaattatgcctttttgggttgaggtgat

SEQ ID NO: 74117 - DNA, 120 bp, Homo sapiens; identical to SEQ ID NO: 55776
  misc_feature: 668 for SV(C|O) and mtDNA

SEQ ID NO: 74118 - DNA, 120 bp, Homo sapiens
  misc_feature: 668 for SV(C|O) and mtDNA
tagcttaacacaaagcacccaacttacacttaggagatttcaacttaacttgaccgctctgagctaaacctagccccaaacccactccaccttactaccagacaaccttagccaaaccat

SEQ ID NO: 74119 - DNA, 120 bp, Homo sapiens; identical to SEQ ID NO: 53894
  misc_feature: 668 for SV(C|O) and mtDNA

SEQ ID NO: 74120 - DNA, 120 bp, Homo sapiens; identical to SEQ ID NO: 58023
  misc_feature: 668 for SV(C|O) and mtDNA

SEQ ID NO: 74121 - DNA, 120 bp, Homo sapiens
  misc_feature: 668 for SV(C|O) and mtDNA
ccttccaaacaacaatccccctctacctaaaactcacagccctcgctgtcactttcctaggacttctaacagccctagacctcaactacctaaccaacaaacttaaaataaaatccccac

SEQ ID NO: 74122 - DNA, 120 bp, Homo sapiens; identical to SEQ ID NO: 52434
  misc_feature: 668 for SV(C|O) and mtDNA

SEQ ID NO: 74123 - DNA, 120 bp, Homo sapiens; identical to SEQ ID NO: 53650
  misc_feature: 668 for SV(C|O) and mtDNA

SEQ ID NO: 74124 - DNA, 120 bp, Homo sapiens; identical to SEQ ID NO: 56199
  misc_feature: 668 for SV(C|O) and mtDNA

SEQ ID NO: 74125 - DNA, 120 bp, Homo sapiens
  misc_feature: 668 for SV(C|O) and mtDNA
ggtgatttggaggatcaggcaggcgccaaggagtgagccgaagtttcatcatgcggagatgttggatggggtggggaggtcgatgaatgagtggttaattaattttattagggggttaat

SEQ ID NO: 74126 - DNA, 120 bp, Homo sapiens
  misc_feature: 668 for SV(C|O) and mtDNA
ccataaaattcttcttagtagctattaccttcttattatttgatctagaaattgccctccttttacccctaccatgagccctacaaacaactaacctaccactaatagttatgtcatccc

SEQ ID NO: 74127 - DNA, 120 bp, Homo sapiens
  misc_feature: 668 for SV(C|O) and mtDNA
attacagtcaaatcccttctcgtccccatggatgacccccctcagataggggtcccttgaccaccatcctccgtgaaatcaatatcccgcacaagagtgctactctcctcgctccgggcc

SEQ ID NO: 74128 - DNA, 120 bp, Homo sapiens
  misc_feature: 668 for SV(C|O) and mtDNA
aactaggcggctatggtataatacgcctcacactcattctcaaccccctgacaaaacacatagcctaccccttccttgtactatccctatgaggcataattataacaagctccatctgcc

SEQ ID NO: 74129 - DNA, 120 bp, Homo sapiens
  misc_feature: 668 for SV(C|O) and mtDNA
atcaccagtattagaggcaccgcctgcccagtgacacatgtttaacggccgcggtaccctaaccgtgcaaaggtagcataatcacttgttccttaaatagggacctgtatgaatggctcc

SEQ ID NO: 74130 - DNA, 120 bp, Homo sapiens; identical to SEQ ID NO: 59559
  misc_feature: 668 for SV(C|O) and mtDNA

SEQ ID NO: 74131 - DNA, 120 bp, Homo sapiens
  misc_feature: 668 for SV(C|O) and mtDNA
gcctagccctactagtctcaatctccaacacatatggcctagactacgtacataacctaaacctactccaatgctaaaactaatcgtcccaacaattatattactaccactgacatgact

SEQ ID NO: 74132 - DNA, 120 bp, Homo sapiens
  misc_feature: 668 for SV(C|O) and mtDNA
acaaccacgaccaatgatatgaaaaaccatcgttgtatttcaactacaagaacaccaatgaccccaatacgcaaaattaaccccctaataaaattaattaaccactcattcatcgacctc

SEQ ID NO: 74133 - DNA, 120 bp, Homo sapiens; identical to SEQ ID NO: 58323
  misc_feature: 668 for SV(C|O) and mtDNA

SEQ ID NO: 74134 - DNA, 120 bp, Homo sapiens
  misc_feature: 668 for SV(C|O) and mtDNA
ctcctgagccaacaacttaatatgactagcttacacaatagcttttatagtaaagatacctctttacggactccacttatgactccctaaagcccatgtcgaagcccccatcgctgggtc

SEQ ID NO: 74135 - DNA, 120 bp, Homo sapiens
  misc_feature: 668 for SV(C|O) and mtDNA
ctttgtatgattatgggcgttgattagtagtagttactggttgaacattgtttgttggtgtatatattgtaattgagattgctcgggggaataggttatgtgattaggagtagggttagg

SEQ ID NO: 74136 - DNA, 120 bp, Homo sapiens
  misc_feature: 668 for SV(C|O) and mtDNA
ccttatccccatactagttattatcgaaaccatcagcctactcattcaaccaatagccctggccgtacgcctaaccgctaacattactgcaggccacctactcatgcacctaattggaag

SEQ ID NO: 74137 - DNA, 120 bp, Homo sapiens
  misc_feature: 668 for SV(C|O) and mtDNA
ctcattcatttctctaacagcagtaatattaataattttcatgatttgagaagccttcgcttcgaagcgaaaagtcctaatagtagaagaaccctccataaacctggagtgactatatgg

SEQ ID NO: 74138 - DNA, 120 bp, Homo sapiens
  misc_feature: 668 for SV(C|O) and mtDNA
aaaatgccctagcccacttcttaccacaaggcacacctacaccccttatccccatactagttattatcgaaaccatcagcctactcattcaaccaatagccctggccgtacgcctaaccg

SEQ ID NO: 74139 - DNA, 120 bp, Homo sapiens
  misc_feature: 668 for SV(C|O) and mtDNA
aaggcgacagcgatttctaggatagtcagtagaattagaattgtgaagatgataagtgtagagggaaggttaatggttgatattgctagggtggcgcttccaattaggtgcatgagtagg

SEQ ID NO: 74140 - DNA, 120 bp, Homo sapiens
  misc_feature: 668 for SV(C|O) and mtDNA
catctccgcatgatgaaacttcggctcactccttggcgcctgcctgatcctccaaatcaccacaggactattcctagccatgcactactcaccagacgcctcaaccgccttttcatcaat

SEQ ID NO: 74141 - DNA, 120 bp, Homo sapiens
  misc_feature: 668 for SV(C|O) and mtDNA
cactactataaccaccctaaccctgacttccctaattccccccatccttaccaccctcgttaaccctaacaaaaaaaactcatacccccattatgtaaaatccattgtcgcatccacctt

SEQ ID NO: 74142 - DNA, 120 bp, Homo sapiens; identical to SEQ ID NO: 60100
  misc_feature: 668 for SV(C|O) and mtDNA

SEQ ID NO: 74143 - DNA, 120 bp, Homo sapiens
  misc_feature: 668 for SV(C|O) and mtDNA
aaccaccaccccatcatactctttcacccacagcaccaatcctacctccatcgctaaccccactaaaacactcaccaagacctcaacccctgacccccatgcctcaggatactcctcaat

SEQ ID NO: 74144 - DNA, 120 bp, Homo sapiens
  misc_feature: 668 for SV(C|O) and mtDNA
attctctacaaaccacaaagacattggaacactatacctattattcggcgcatgagctggagtcctaggcacagctctaagcctccttattcgagccgagctgggccagccaggcaacct

SEQ ID NO: 74145 - DNA, 120 bp, Homo sapiens
  misc_feature: 668 for SV(C|O) and mtDNA
atcacctctagcatcaccagtattagaggcaccgcctgcccagtgacacatgtttaacggccgcggtaccctaaccgtgcaaaggtagcataatcacttgttccttaaatagggacctgt

SEQ ID NO: 74146 - DNA, 120 bp, Homo sapiens
  misc_feature: 668 for SV(C|O) and mtDNA
actaggcggctatggtataatacgcctcacactcattctcaaccccctgacaaaacacatagcctaccccttccttgtactatccctatgaggcataattataacaagctccatctgcct

SEQ ID NO: 74147 - DNA, 120 bp, Homo sapiens
  misc_feature: 668 for SV(C|O) and mtDNA
aacgttggggcctttgcgtagttgtatatagcctagaatttttcgttcggtaagcattaggaatgccattgcgattagaatgggtacaatgaggagtaggaggttggccatgggtatgtt

SEQ ID NO: 74148 - DNA, 120 bp, Homo sapiens
  misc_feature: 667 for SV(C|O) and mtDNA
ttttggtgcaactccaaataaaagtaacaaccatgcacactactataaccaccctaaccctgacttccctaattccccccatccttaccaccctcgttaaccctaacaaaaaaaactcat

SEQ ID NO: 74149 - DNA, 120 bp, Homo sapiens
  misc_feature: 667 for SV(C|O) and mtDNA
ttttggacaggtggtgtgtggtggccttggtatgtgctttctcgtgttacatcgcgccatcattggtatatggttagtgtgttggttagtaggcctagtatgaggagcgttatggagtgg

SEQ ID NO: 74150 - DNA, 120 bp, Homo sapiens
  misc_feature: 667 for SV(C|O) and mtDNA
ttttcgtgatagtggttcactggataagtggcgttggcttgccatgattgtgaggggtaggagtcaggtagttagtattaggaggggggttgttagggggtcggaggaaaaggttgggga

SEQ ID NO: 74151 - DNA, 120 bp, Homo sapiens; identical to SEQ ID NO: 55014
  misc_feature: 667 for SV(C|O) and mtDNA

SEQ ID NO: 74152 - DNA, 120 bp, Homo sapiens
  misc_feature: 667 for SV(C|O) and mtDNA
tttgactgtaatgtgctatgtacggtaaatggctttatgtactatgtgctgttaagggtgagtaggtttgttggtatcctagtgggtgaggggtggctttggagttgcagttgatgtgtg

SEQ ID NO: 74153 - DNA, 120 bp, Homo sapiens
  misc_feature: 667 for SV(C|O) and mtDNA
tagtggttcactggataagtggcgttggcttgccatgattgtgaggggtaggagtcaggtagttagtattaggaggggggttgttagggggtcggaggaaaaggttggggaacagctaaa

SEQ ID NO: 74154 - DNA, 120 bp, Homo sapiens
  misc_feature: 667 for SV(C|O) and mtDNA
tcattaataatcataatggctatagcaataaaactaggaatagccccctttcacttctgggtcccagaggttacccaaggcacccctctgacatccggcctgcttcttctcacatgacaa

SEQ ID NO: 74155 - DNA, 120 bp, Homo sapiens
  misc_feature: 667 for SV(C|O) and mtDNA
ttgacccagcgatgggggcttcgacatgggctttagggagtcataagtggagtccgtaaagaggtatctttactataaaagctattgtgtaagctagtcatattaagttgttggctcagg

SEQ ID NO: 74156 - DNA, 120 bp, Homo sapiens; identical to SEQ ID NO: 61589
  misc_feature: 667 for SV(C|O) and mtDNA

SEQ ID NO: 74157 - DNA, 120 bp, Homo sapiens
  misc_feature: 667 for SV(C|O) and mtDNA
ttcatctttcttttcaccgtaggcggcctgactggcattgtattagcaaactcatcactagacatcgtactacacgacacgtactacgttgtagctcacttccactatgtcctatcaata

SEQ ID NO: 74158 - DNA, 120 bp, Homo sapiens; identical to SEQ ID NO: 54113
  misc_feature: 667 for SV(C|O) and mtDNA

SEQ ID NO: 74159 - DNA, 120 bp, Homo sapiens
  misc_feature: 667 for SV(C|O) and mtDNA
acataaaaccctcattcacacgagaaaacaccctcatgttcatacacctatcccccattctcctcctatccctcaaccccgacatcattaccgggttttcctcttgtaaatatagtttaa

SEQ ID NO: 74160 - DNA, 120 bp, Homo sapiens
  misc_feature: 667 for SV(C|O) and mtDNA
acccaactatctataaacctagccatggccatccccttatgagcgggcgcagtgattataggctttcgctctaagattaaaaatgccctagcccacttcttaccacaaggcacacctaca

SEQ ID NO: 74161 - DNA, 120 bp, Homo sapiens
  misc_feature: 667 for SV(C|O) and mtDNA
gtagcttaacacaaagcacccaacttacacttaggagatttcaacttaacttgaccgctctgagctaaacctagccccaaacccactccaccttactaccagacaaccttagccaaacca

SEQ ID NO: 74162 - DNA, 120 bp, Homo sapiens
  misc_feature: 667 for SV(C|O) and mtDNA
cccccattatgtaaaatccattgtcgcatccacctttattatcagtctcttccccacaacaatattcatgtgcctagaccaagaagttattatctcgaactgacactgagccacaaccca

SEQ ID NO: 74163 - DNA, 120 bp, Homo sapiens
  misc_feature: 667 for SV(C|O) and mtDNA
agagtgtagcttaacacaaagcacccaacttacacttaggagatttcaacttaacttgaccgctctgagctaaacctagccccaaacccactccaccttactaccagacaaccttagcca

SEQ ID NO: 74164 - DNA, 120 bp, Homo sapiens; identical to SEQ ID NO: 53803
  misc_feature: 667 for SV(C|O) and mtDNA

SEQ ID NO: 74165 - DNA, 120 bp, Homo sapiens; identical to SEQ ID NO: 52355
  misc_feature: 667 for SV(C|O) and mtDNA

SEQ ID NO: 74166 - DNA, 120 bp, Homo sapiens
  misc_feature: 667 for SV(C|O) and mtDNA
tccataaaattcttcttagtagctattaccttcttattatttgatctagaaattgccctccttttacccctaccatgagccctacaaacaactaacctaccactaatagttatgtcatcc

SEQ ID NO: 74167 - DNA, 120 bp, Homo sapiens; identical to SEQ ID NO: 58984
  misc_feature: 667 for SV(C|O) and mtDNA

SEQ ID NO: 74168 - DNA, 120 bp, Homo sapiens
  misc_feature: 667 for SV(C|O) and mtDNA
tcagcgaagggttgtagtagcccgtaggggcctacaacgttggggcctttgcgtagttgtatatagcctagaatttttcgttcggtaagcattaggaatgccattgcgattagaatgggt

SEQ ID NO: 74169 - DNA, 120 bp, Homo sapiens; identical to SEQ ID NO: 53339
  misc_feature: 667 for SV(C|O) and mtDNA

SEQ ID NO: 74170 - DNA, 120 bp, Homo sapiens
  misc_feature: 667 for SV(C|O) and mtDNA
tagcaggaatcttcttactcatccgcttccaccccctagcagaaaatagcccactaatccaaactctaacactatgcttaggcgctatcaccactctgttcgcagcagtctgcgccctta

SEQ ID NO: 74171 - DNA, 120 bp, Homo sapiens
  misc_feature: 667 for SV(C|O) and mtDNA
aaacactcaccaagacctcaacccctgacccccatgcctcaggatactcctcaatagccatcgctgtagtatatccaaagacaaccatcattccccctaaataaattaaaaaaactatta

SEQ ID NO: 74172 - DNA, 120 bp, Homo sapiens
  misc_feature: 667 for SV(C|O) and mtDNA
gctacaaagtaagcgcaagtacccacgtaaagacgttaggtcaaggtgtagcccatgaggtggcaagaaatgggctacattttctaccccagaaaactacgatagcccttatgaaactta

SEQ ID NO: 74173 - DNA, 120 bp, Homo sapiens
  misc_feature: 667 for SV(C|O) and mtDNA
taagaaatatgtctgataaaagagttactttgatagagtaaataataggagcttaaacccccttatttctaggactatgagaatcgaacccatccctgagaatccaaaattctccgtgcc

SEQ ID NO: 74174 - DNA, 120 bp, Homo sapiens
  misc_feature: 667 for SV(C|O) and mtDNA
aagatttataggtagaggcgacaaacctaccgagcctggtgatagctggttgtccaagatagaatcttagttcaactttaaatttgcccacagaaccctctaaatccccttgtaaattta

SEQ ID NO: 74175 - DNA, 120 bp, Homo sapiens
  misc_feature: 667 for SV(C|O) and mtDNA
gaatagtttaaattagaatcttagctttgggtgctaatggtggagttaaagactttttctctgatttgtccttggaaaaaggttttcatctccggtttacaagactggtgtattagttta

SEQ ID NO: 74176 - DNA, 120 bp, Homo sapiens
  misc_feature: 667 for SV(C|O) and mtDNA
gtttttttcgtgatagtggttcactggataagtggcgttggcttgccatgattgtgaggggtaggagtcaggtagttagtattaggaggggggttgttagggggtcggaggaaaaggttg

SEQ ID NO: 74177 - DNA, 120 bp, Homo sapiens
  misc_feature: 667 for SV(C|O) and mtDNA
gtggtgtatgcatcggggtagtccgagtaacgtcggggcattccggataggccgagaaagtgttgtgggaagaaagttagatttacgccgatgaatatgatagtgaaatggattttggcg

SEQ ID NO: 74178 - DNA, 120 bp, Homo sapiens
  misc_feature: 667 for SV(C|O) and mtDNA
cacgaccaatgatatgaaaaaccatcgttgtatttcaactacaagaacaccaatgaccccaatacgcaaaattaaccccctaataaaattaattaaccactcattcatcgacctccccac

SEQ ID NO: 74179 - DNA, 120 bp, Homo sapiens; identical to SEQ ID NO: 57413
  misc_feature: 667 for SV(C|O) and mtDNA

SEQ ID NO: 74180 - DNA, 120 bp, Homo sapiens
  misc_feature: 667 for SV(C|O) and mtDNA
ggcctagccctactagtctcaatctccaacacatatggcctagactacgtacataacctaaacctactccaatgctaaaactaatcgtcccaacaattatattactaccactgacatgac

SEQ ID NO: 74181 - DNA, 120 bp, Homo sapiens; identical to SEQ ID NO: 55783
  misc_feature: 667 for SV(C|O) and mtDNA

SEQ ID NO: 74182 - DNA, 120 bp, Homo sapiens; identical to SEQ ID NO: 58925
  misc_feature: 667 for SV(C|O) and mtDNA

SEQ ID NO: 74183 - DNA, 120 bp, Homo sapiens
  misc_feature: 667 for SV(C|O) and mtDNA
gattgcgctgttatccctagggtaacttgttccgttggtcaagttattggatcaattgagtatagtagttcgctttgactggtgaagtcttagcatgtactgctcggaggttgggttctg

SEQ ID NO: 74184 - DNA, 120 bp, Homo sapiens; identical to SEQ ID NO: 59385
  misc_feature: 667 for SV(C|O) and mtDNA

SEQ ID NO: 74185 - DNA, 120 bp, Homo sapiens
  misc_feature: 667 for SV(C|O) and mtDNA
gaggatggatagtaatagggcaaggacgcctcctagtttgttagggacggatcggagaattgtgtaggcgaataggaaatatcattcgggcttgatgtggggaggggtgtttaaggggtt

SEQ ID NO: 74186 - DNA, 120 bp, Homo sapiens
  misc_feature: 667 for SV(C|O) and mtDNA
actcttaaaactaggcggctatggtataatacgcctcacactcattctcaaccccctgacaaaacacatagcctaccccttccttgtactatccctatgaggcataattataacaagctc

SEQ ID NO: 74187 - DNA, 120 bp, Homo sapiens
  misc_feature: 667 for SV(C|O) and mtDNA
gagcttatcacctttcatgatcacgccctcataatcattttccttatctgcttcctagtcctgtatgcccttttcctaacactcacaacaaaactaactaatactaacatctcagacgct

SEQ ID NO: 74188 - DNA, 120 bp, Homo sapiens; identical to SEQ ID NO: 61142
  misc_feature: 667 for SV(C|O) and mtDNA

SEQ ID NO: 74189 - DNA, 120 bp, Homo sapiens; identical to SEQ ID NO: 57912
  misc_feature: 667 for SV(C|O) and mtDNA

SEQ ID NO: 74190 - DNA, 120 bp, Homo sapiens; identical to SEQ ID NO: 57182
  misc_feature: 667 for SV(C|O) and mtDNA

SEQ ID NO: 74191 - DNA, 120 bp, Homo sapiens
  misc_feature: 667 for SV(C|O) and mtDNA
agggtaaaatagagacccagtaaaattgtaataagcagtgcttgaattatttggtttcggttgttttctattagactatggtgagctcaggtgattgatactcctgatgcgagtaatacg

SEQ ID NO: 74192 - DNA, 120 bp, Homo sapiens
  misc_feature: 667 for SV(C|O) and mtDNA
catttcttgccacctcatgggctacaccttgacctaacgtctttacgtgggtacttgcgcttactttgtagccttcatcagggtttgctgaagatggcggtatataggctgagcaagagg

SEQ ID NO: 74193 - DNA, 120 bp, Homo sapiens
  misc_feature: 667 for SV(C|O) and mtDNA
aataggattgcgctgttatccctagggtaacttgttccgttggtcaagttattggatcaattgagtatagtagttcgctttgactggtgaagtcttagcatgtactgctcggaggttggg

SEQ ID NO: 74194 - DNA, 120 bp, Homo sapiens
  misc_feature: 667 for SV(C|O) and mtDNA
cactaggaaaaaaccttgtagagagagtaaaaaatttaacacccatagtaggcctaaaagcagccaccaattaagaaagcgttcaagctcaacacccactacctaaaaaatcccaaacat

SEQ ID NO: 74195 - DNA, 120 bp, Homo sapiens
  misc_feature: 667 for SV(C|O) and mtDNA
acgttggggcctttgcgtagttgtatatagcctagaatttttcgttcggtaagcattaggaatgccattgcgattagaatgggtacaatgaggagtaggaggttggccatgggtatgttg

SEQ ID NO: 74196 - DNA, 120 bp, Homo sapiens
  misc_feature: 667 for SV(C|O) and mtDNA
actccagcctagcccctaccccccaattaggagggcactggcccccaacaggcatcaccccgctaaatcccctagaagtcccactcctaaacacatccgtattactcgcatcaggagtat

SEQ ID NO: 74197 - DNA, 120 bp, Homo sapiens
  misc_feature: 667 for SV(C|O) and mtDNA
actctttcacccacagcaccaatcctacctccatcgctaaccccactaaaacactcaccaagacctcaacccctgacccccatgcctcaggatactcctcaatagccatcgctgtagtat

SEQ ID NO: 74198 - DNA, 120 bp, Homo sapiens
  misc_feature: 666 for SV(C|O) and mtDNA
tttatgtactacaggtggtcaagtatttatggtaccgtacaatattcatggtggctggcagtaatgtacgaattacatagcggttgttgatgggtgagtcaatacttgggtggcacccaa

SEQ ID NO: 74199 - DNA, 120 bp, Homo sapiens
  misc_feature: 666 for SV(C|O) and mtDNA
ttgcttgtaagcatggggagggggttttgatgtggattgggtttttatgtactacaggtggtcaagtatttatggtaccgtacaatattcatggtggctggcagtaatgtacgaattaca

SEQ ID NO: 74200 - DNA, 120 bp, Homo sapiens
  misc_feature: 666 for SV(C|O) and mtDNA
ttgctatagccattatgattattaatgatgagtattgattggtagtattggttatggttcattgtccggagagtatattgttgaagaggatagctattagaaggattatggatgcggttg

SEQ ID NO: 74201 - DNA, 120 bp, Homo sapiens
  misc_feature: 666 for SV(C|O) and mtDNA
ttctctacaaaccacaaagacattggaacactatacctattattcggcgcatgagctggagtcctaggcacagctctaagcctccttattcgagccgagctgggccagccaggcaacctt

SEQ ID NO: 74202 - DNA, 120 bp, Homo sapiens; identical to SEQ ID NO: 58138
  misc_feature: 666 for SV(C|O) and mtDNA

SEQ ID NO: 74203 - DNA, 120 bp, Homo sapiens
  misc_feature: 666 for SV(C|O) and mtDNA
gcaggaatcttcttactcatccgcttccaccccctagcagaaaatagcccactaatccaaactctaacactatgcttaggcgctatcaccactctgttcgcagcagtctgcgcccttaca

SEQ ID NO: 74204 - DNA, 120 bp, Homo sapiens
  misc_feature: 666 for SV(C|O) and mtDNA
cagctatccattggtcttaggccccaaaaattttggtgcaactccaaataaaagtaacaaccatgcacactactataaccaccctaaccctgacttccctaattccccccatccttacca

SEQ ID NO: 74205 - DNA, 120 bp, Homo sapiens; identical to SEQ ID NO: 59314
  misc_feature: 666 for SV(C|O) and mtDNA

SEQ ID NO: 74206 - DNA, 120 bp, Homo sapiens
  misc_feature: 666 for SV(C|O) and mtDNA
tcctgagccaacaacttaatatgactagcttacacaatagcttttatagtaaagatacctctttacggactccacttatgactccctaaagcccatgtcgaagcccccatcgctgggtca

SEQ ID NO: 74207 - DNA, 120 bp, Homo sapiens; identical to SEQ ID NO: 53124
  misc_feature: 666 for SV(C|O) and mtDNA

SEQ ID NO: 74208 - DNA, 120 bp, Homo sapiens
  misc_feature: 666 for SV(C|O) and mtDNA
tcgtaaaccctattgttgatatggactctagaataggattgcgctgttatccctagggtaacttgttccgttggtcaagttattggatcaattgagtatagtagttcgctttgactggtg

SEQ ID NO: 74209 - DNA, 120 bp, Homo sapiens; identical to SEQ ID NO: 57298
  misc_feature: 666 for SV(C|O) and mtDNA

SEQ ID NO: 74210 - DNA, 120 bp, Homo sapiens
  misc_feature: 666 for SV(C|O) and mtDNA
tcactcgagacgtaaattatggctgaatcatccgctaccttcacgccaatggcgcctcaatattctttatctgcctcttcctacacatcgggcgaggcctatattacggatcatttctct

SEQ ID NO: 74211 - DNA, 120 bp, Homo sapiens; identical to SEQ ID NO: 55068
  misc_feature: 666 for SV(C|O) and mtDNA

SEQ ID NO: 74212 - DNA, 120 bp, Homo sapiens
  misc_feature: 666 for SV(C|O) and mtDNA
tatatattgtaattgagattgctcgggggaataggttatgtgattaggagtagggttaggatgagtgggaagaagaaagagaggaagtaaagtttaattatgcctttttgggttgaggtg

SEQ ID NO: 74213 - DNA, 120 bp, Homo sapiens; identical to SEQ ID NO: 57075
  misc_feature: 666 for SV(C|O) and mtDNA

SEQ ID NO: 74214 - DNA, 120 bp, Homo sapiens; identical to SEQ ID NO: 60755
  misc_feature: 666 for SV(C|O) and mtDNA

SEQ ID NO: 74215 - DNA, 120 bp, Homo sapiens
  misc_feature: 666 for SV(C|O) and mtDNA
taggcggctatggtataatacgcctcacactcattctcaaccccctgacaaaacacatagcctaccccttccttgtactatccctatgaggcataattataacaagctccatctgcctac

SEQ ID NO: 74216 - DNA, 120 bp, Homo sapiens; identical to SEQ ID NO: 54903
  misc_feature: 666 for SV(C|O) and mtDNA

SEQ ID NO: 74217 - DNA, 120 bp, Homo sapiens; identical to SEQ ID NO: 59911
  misc_feature: 666 for SV(C|O) and mtDNA

SEQ ID NO: 74218 - DNA, 120 bp, Homo sapiens
  misc_feature: 666 for SV(C|O) and mtDNA
gtgatttggaggatcaggcaggcgccaaggagtgagccgaagtttcatcatgcggagatgttggatggggtggggaggtcgatgaatgagtggttaattaattttattagggggttaatt

SEQ ID NO: 74219 - DNA, 120 bp, Homo sapiens; identical to SEQ ID NO: 58960
  misc_feature: 666 for SV(C|O) and mtDNA

SEQ ID NO: 74220 - DNA, 120 bp, Homo sapiens
  misc_feature: 666 for SV(C|O) and mtDNA
cgaccaatgatatgaaaaaccatcgttgtatttcaactacaagaacaccaatgaccccaatacgcaaaattaaccccctaataaaattaattaaccactcattcatcgacctccccaccc

SEQ ID NO: 74221 - DNA, 120 bp, Homo sapiens; identical to SEQ ID NO: 61704
  misc_feature: 666 for SV(C|O) and mtDNA

SEQ ID NO: 74222 - DNA, 120 bp, Homo sapiens; identical to SEQ ID NO: 56200
  misc_feature: 666 for SV(C|O) and mtDNA

SEQ ID NO: 74223 - DNA, 120 bp, Homo sapiens
  misc_feature: 666 for SV(C|O) and mtDNA
ggcgacagcgatttctaggatagtcagtagaattagaattgtgaagatgataagtgtagagggaaggttaatggttgatattgctagggtggcgcttccaattaggtgcatgagtaggtg

SEQ ID NO: 74224 - DNA, 120 bp, Homo sapiens; identical to SEQ ID NO: 57049
  misc_feature: 666 for SV(C|O) and mtDNA

SEQ ID NO: 74225 - DNA, 120 bp, Homo sapiens
  misc_feature: 666 for SV(C|O) and mtDNA
gcttcgaagcgaaggcttctcaaatcatgaaaattattaatattactgctgttagagaaatgaatgagcctacagatgataggatgtttcatgtggtgtatgcatcggggtagtccgagt

SEQ ID NO: 74226 - DNA, 120 bp, Homo sapiens
  misc_feature: 666 for SV(C|O) and mtDNA
gccattgcgattagaatgggtacaatgaggagtaggaggttggccatgggtatgttgttaagaagaggaattgaacctctgactgtaaagttttaagttttatgcgattaccgggctctg

SEQ ID NO: 74227 - DNA, 120 bp, Homo sapiens; identical to SEQ ID NO: 59025
  misc_feature: 666 for SV(C|O) and mtDNA

SEQ ID NO: 74228 - DNA, 120 bp, Homo sapiens
  misc_feature: 666 for SV(C|O) and mtDNA
ataaaattcttcttagtagctattaccttcttattatttgatctagaaattgccctccttttacccctaccatgagccctacaaacaactaacctaccactaatagttatgtcatccctc

SEQ ID NO: 74229 - DNA, 120 bp, Homo sapiens
  misc_feature: 666 for SV(C|O) and mtDNA
gaatcgaacccatccctgagaatccaaaattctccgtgccacctatcacaccccatcctaaagtaaggtcagctaaataagctatcgggcccataccccgaaaatgttggttataccctt

SEQ ID NO: 74230 - DNA, 120 bp, Homo sapiens
  misc_feature: 666 for SV(C|O) and mtDNA
ctagcatcaccagtattagaggcaccgcctgcccagtgacacatgtttaacggccgcggtaccctaaccgtgcaaaggtagcataatcacttgttccttaaatagggacctgtatgaatg

SEQ ID NO: 74231 - DNA, 120 bp, Homo sapiens
  misc_feature: 666 for SV(C|O) and mtDNA
cgctgttatccctagggtaacttgttccgttggtcaagttattggatcaattgagtatagtagttcgctttgactggtgaagtcttagcatgtactgctcggaggttgggttctgctccg

SEQ ID NO: 74232 - DNA, 120 bp, Homo sapiens
  misc_feature: 666 for SV(C|O) and mtDNA
cctagccctactagtctcaatctccaacacatatggcctagactacgtacataacctaaacctactccaatgctaaaactaatcgtcccaacaattatattactaccactgacatgactt

SEQ ID NO: 74233 - DNA, 120 bp, Homo sapiens
  misc_feature: 666 for SV(C|O) and mtDNA
ccctttctccataaaattcttcttagtagctattaccttcttattatttgatctagaaattgccctccttttacccctaccatgagccctacaaacaactaacctaccactaatagttat

SEQ ID NO: 74234 - DNA, 120 bp, Homo sapiens
  misc_feature: 666 for SV(C|O) and mtDNA
cagttcttgtgagctttctcggtaaataaggggtcgtaagcctctgttgtcagattcacaatctgatgttttggttaaactatatttacaagaggaaaacccggtaatgatgtcggggtt

SEQ ID NO: 74235 - DNA, 120 bp, Homo sapiens
  misc_feature: 666 for SV(C|O) and mtDNA
caccccttatccccatactagttattatcgaaaccatcagcctactcattcaaccaatagccctggccgtacgcctaaccgctaacattactgcaggccacctactcatgcacctaattg

SEQ ID NO: 74236 - DNA, 120 bp, Homo sapiens
  misc_feature: 666 for SV(C|O) and mtDNA
aggatggatagtaatagggcaaggacgcctcctagtttgttagggacggatcggagaattgtgtaggcgaataggaaatatcattcgggcttgatgtggggaggggtgtttaaggggttg

SEQ ID NO: 74237 - DNA, 120 bp, Homo sapiens
  misc_feature: 666 for SV(C|O) and mtDNA
agttcttgtgagctttctcggtaaataaggggtcgtaagcctctgttgtcagattcacaatctgatgttttggttaaactatatttacaagaggaaaacccggtaatgatgtcggggttg

SEQ ID NO: 74238 - DNA, 120 bp, Homo sapiens
  misc_feature: 666 for SV(C|O) and mtDNA
atcttcttactcatccgcttccaccccctagcagaaaatagcccactaatccaaactctaacactatgcttaggcgctatcaccactctgttcgcagcagtctgcgcccttacacaaaat

SEQ ID NO: 74239 - DNA, 120 bp, Homo sapiens; identical to SEQ ID NO: 59894
  misc_feature: 666 for SV(C|O) and mtDNA

SEQ ID NO: 74240 - DNA, 120 bp, Homo sapiens
  misc_feature: 666 for SV(C|O) and mtDNA
aaggataacagctatccattggtcttaggccccaaaaattttggtgcaactccaaataaaagtaacaaccatgcacactactataaccaccctaaccctgacttccctaattccccccat

SEQ ID NO: 74241 - DNA, 120 bp, Homo sapiens; identical to SEQ ID NO: 59650
  misc_feature: 666 for SV(C|O) and mtDNA

SEQ ID NO: 74242 - DNA, 120 bp, Homo sapiens
  misc_feature: 665 for SV(C|O) and mtDNA
ttttttcgtgatagtggttcactggataagtggcgttggcttgccatgattgtgaggggtaggagtcaggtagttagtattaggaggggggttgttagggggtcggaggaaaaggttggg

SEQ ID NO: 74243 - DNA, 120 bp, Homo sapiens; identical to SEQ ID NO: 59224
  misc_feature: 665 for SV(C|O) and mtDNA

SEQ ID NO: 74244 - DNA, 120 bp, Homo sapiens
  misc_feature: 665 for SV(C|O) and mtDNA
ccctactagtctcaatctccaacacatatggcctagactacgtacataacctaaacctactccaatgctaaaactaatcgtcccaacaattatattactaccactgacatgactttccaa

SEQ ID NO: 74245 - DNA, 120 bp, Homo sapiens; identical to SEQ ID NO: 58677
  misc_feature: 665 for SV(C|O) and mtDNA

SEQ ID NO: 74246 - DNA, 120 bp, Homo sapiens; identical to SEQ ID NO: 52710
  misc_feature: 665 for SV(C|O) and mtDNA

SEQ ID NO: 74247 - DNA, 120 bp, Homo sapiens
  misc_feature: 665 for SV(C|O) and mtDNA
ctaccctaccatcacacaccgcacaatcccctatctaggccttcttacgagccaaaacctgcccctactcctcctagacctaacctgactagaaaagctattacctaaaacaatttcaca

SEQ ID NO: 74248 - DNA, 120 bp, Homo sapiens; identical to SEQ ID NO: 56041
  misc_feature: 665 for SV(C|O) and mtDNA

SEQ ID NO: 74249 - DNA, 120 bp, Homo sapiens; identical to SEQ ID NO: 58374
  misc_feature: 665 for SV(C|O) and mtDNA

SEQ ID NO: 74250 - DNA, 120 bp, Homo sapiens
  misc_feature: 665 for SV(C|O) and mtDNA
gcattaaccttttaagttaaagattaagagaaccaacacctctttacagtgaaatgccccaactaaatactaccgtatggcccaccataattacccccatactccttacactattcctca

SEQ ID NO: 74251 - DNA, 120 bp, Homo sapiens
  misc_feature: 665 for SV(C|O) and mtDNA
aaagccatttaccgtacatagcacattacagtcaaatcccttctcgtccccatggatgacccccctcagataggggtcccttgaccaccatcctccgtgaaatcaatatcccgcacaaga

SEQ ID NO: 74252 - DNA, 120 bp, Homo sapiens
  misc_feature: 665 for SV(C|O) and mtDNA
gaggtagagtttttttcgtgatagtggttcactggataagtggcgttggcttgccatgattgtgaggggtaggagtcaggtagttagtattaggaggggggttgttagggggtcggagga

SEQ ID NO: 74253 - DNA, 120 bp, Homo sapiens
  misc_feature: 665 for SV(C|O) and mtDNA
tccctttctccataaaattcttcttagtagctattaccttcttattatttgatctagaaattgccctccttttacccctaccatgagccctacaaacaactaacctaccactaatagtta

SEQ ID NO: 74254 - DNA, 120 bp, Homo sapiens; identical to SEQ ID NO: 58623
  misc_feature: 665 for SV(C|O) and mtDNA

SEQ ID NO: 74255 - DNA, 120 bp, Homo sapiens
  misc_feature: 665 for SV(C|O) and mtDNA
gtggttcactggataagtggcgttggcttgccatgattgtgaggggtaggagtcaggtagttagtattaggaggggggttgttagggggtcggaggaaaaggttggggaacagctaaata

SEQ ID NO: 74256 - DNA, 120 bp, Homo sapiens; identical to SEQ ID NO: 55966
  misc_feature: 665 for SV(C|O) and mtDNA

SEQ ID NO: 74257 - DNA, 120 bp, Homo sapiens
  misc_feature: 665 for SV(C|O) and mtDNA
tataaccaccctaaccctgacttccctaattccccccatccttaccaccctcgttaaccctaacaaaaaaaactcatacccccattatgtaaaatccattgtcgcatccacctttattat

SEQ ID NO: 74258 - DNA, 120 bp, Homo sapiens; identical to SEQ ID NO: 55292
  misc_feature: 665 for SV(C|O) and mtDNA

SEQ ID NO: 74259 - DNA, 120 bp, Homo sapiens
  misc_feature: 665 for SV(C|O) and mtDNA
gttggttagtaggcctagtatgaggagcgttatggagtggaagtgaaatcacatggctaggccggaggtcattaggagggctgagagggcccctgttaggggtcatgggctgggttttac

SEQ ID NO: 74260 - DNA, 120 bp, Homo sapiens; identical to SEQ ID NO: 57205
  misc_feature: 665 for SV(C|O) and mtDNA

SEQ ID NO: 74261 - DNA, 120 bp, Homo sapiens
  misc_feature: 665 for SV(C|O) and mtDNA
gagggtaaaatagagacccagtaaaattgtaataagcagtgcttgaattatttggtttcggttgttttctattagactatggtgagctcaggtgattgatactcctgatgcgagtaatac

SEQ ID NO: 74262 - DNA, 120 bp, Homo sapiens; identical to SEQ ID NO: 56253
  misc_feature: 665 for SV(C|O) and mtDNA

SEQ ID NO: 74263 - DNA, 120 bp, Homo sapiens
  misc_feature: 665 for SV(C|O) and mtDNA
gtaaaatagagacccagtaaaattgtaataagcagtgcttgaattatttggtttcggttgttttctattagactatggtgagctcaggtgattgatactcctgatgcgagtaatacggat

SEQ ID NO: 74264 - DNA, 120 bp, Homo sapiens
  misc_feature: 665 for SV(C|O) and mtDNA
aataatccccatcctccatatatccaaacaacaaagcataatatttcgcccactaagccaatcactttattgactcctagccgcagacctcctcattctaacctgaatcggaggacaacc

SEQ ID NO: 74265 - DNA, 120 bp, Homo sapiens; identical to SEQ ID NO: 58148
  misc_feature: 665 for SV(C|O) and mtDNA

SEQ ID NO: 74266 - DNA, 120 bp, Homo sapiens; identical to SEQ ID NO: 61702
  misc_feature: 665 for SV(C|O) and mtDNA

SEQ ID NO: 74267 - DNA, 120 bp, Homo sapiens
  misc_feature: 665 for SV(C|O) and mtDNA
gctttgtatgattatgggcgttgattagtagtagttactggttgaacattgtttgttggtgtatatattgtaattgagattgctcgggggaataggttatgtgattaggagtagggttag

SEQ ID NO: 74268 - DNA, 120 bp, Homo sapiens; identical to SEQ ID NO: 53490
  misc_feature: 665 for SV(C|O) and mtDNA

SEQ ID NO: 74269 - DNA, 120 bp, Homo sapiens
  misc_feature: 665 for SV(C|O) and mtDNA
cgacagcgatttctaggatagtcagtagaattagaattgtgaagatgataagtgtagagggaaggttaatggttgatattgctagggtggcgcttccaattaggtgcatgagtaggtggc

SEQ ID NO: 74270 - DNA, 120 bp, Homo sapiens
  misc_feature: 665 for SV(C|O) and mtDNA
atctccgcatgatgaaacttcggctcactccttggcgcctgcctgatcctccaaatcaccacaggactattcctagccatgcactactcaccagacgcctcaaccgccttttcatcaatc

SEQ ID NO: 74271 - DNA, 120 bp, Homo sapiens
  misc_feature: 665 for SV(C|O) and mtDNA
aaaataaaatccccactatgcacattttatttctccaacatactcggattctaccctaccatcacacaccgcacaatcccctatctaggccttcttacgagccaaaacctgcccctactc

SEQ ID NO: 74272 - DNA, 120 bp, Homo sapiens; identical to SEQ ID NO: 57248
  misc_feature: 665 for SV(C|O) and mtDNA

SEQ ID NO: 74273 - DNA, 120 bp, Homo sapiens; identical to SEQ ID NO: 58932
  misc_feature: 665 for SV(C|O) and mtDNA

SEQ ID NO: 74274 - DNA, 120 bp, Homo sapiens
  misc_feature: 665 for SV(C|O) and mtDNA
ccatttcttgccacctcatgggctacaccttgacctaacgtctttacgtgggtacttgcgcttactttgtagccttcatcagggtttgctgaagatggcggtatataggctgagcaagag

SEQ ID NO: 74275 - DNA, 120 bp, Homo sapiens; identical to SEQ ID NO: 60305
  misc_feature: 665 for SV(C|O) and mtDNA

SEQ ID NO: 74276 - DNA, 120 bp, Homo sapiens; identical to SEQ ID NO: 57468
  misc_feature: 665 for SV(C|O) and mtDNA

SEQ ID NO: 74277 - DNA, 120 bp, Homo sapiens
  misc_feature: 665 for SV(C|O) and mtDNA
ctaggaaaaaaccttgtagagagagtaaaaaatttaacacccatagtaggcctaaaagcagccaccaattaagaaagcgttcaagctcaacacccactacctaaaaaatcccaaacatat

SEQ ID NO: 74278 - DNA, 120 bp, Homo sapiens
  misc_feature: 665 for SV(C|O) and mtDNA
cgtcagcgaagggttgtagtagcccgtaggggcctacaacgttggggcctttgcgtagttgtatatagcctagaatttttcgttcggtaagcattaggaatgccattgcgattagaatgg

SEQ ID NO: 74279 - DNA, 120 bp, Homo sapiens
  misc_feature: 665 for SV(C|O) and mtDNA
aggcggctatggtataatacgcctcacactcattctcaaccccctgacaaaacacatagcctaccccttccttgtactatccctatgaggcataattataacaagctccatctgcctacg

SEQ ID NO: 74280 - DNA, 120 bp, Homo sapiens
  misc_feature: 665 for SV(C|O) and mtDNA
attattatgtcctacaagcattaattaattaacacactttagtaagtatgttcgtctgtaatattgaacgtaggtgcgataaataataggatgaggcaggaatcaaagacagatactgcg

SEQ ID NO: 74281 - DNA, 120 bp, Homo sapiens
  misc_feature: 665 for SV(C|O) and mtDNA
catctttcttttcaccgtaggcggcctgactggcattgtattagcaaactcatcactagacatcgtactacacgacacgtactacgttgtagctcacttccactatgtcctatcaatagg

SEQ ID NO: 74282 - DNA, 120 bp, Homo sapiens; identical to SEQ ID NO: 58363
  misc_feature: 665 for SV(C|O) and mtDNA

SEQ ID NO: 74283 - DNA, 120 bp, Homo sapiens
  misc_feature: 665 for SV(C|O) and mtDNA
cataaaattcttcttagtagctattaccttcttattatttgatctagaaattgccctccttttacccctaccatgagccctacaaacaactaacctaccactaatagttatgtcatccct

SEQ ID NO: 74284 - DNA, 120 bp, Homo sapiens
  misc_feature: 665 for SV(C|O) and mtDNA
cacgcgatagcattgcgagacgctggagccggagcaccctatgtcgcagtatctgtctttgattcctgcctcatcctattatttatcgcacctacgttcaatattacagacgaacatact

SEQ ID NO: 74285 - DNA, 120 bp, Homo sapiens
  misc_feature: 665 for SV(C|O) and mtDNA
aaatagagacccagtaaaattgtaataagcagtgcttgaattatttggtttcggttgttttctattagactatggtgagctcaggtgattgatactcctgatgcgagtaatacggatgtg

SEQ ID NO: 74286 - DNA, 120 bp, Homo sapiens
  misc_feature: 665 for SV(C|O) and mtDNA
atcatgcggagatgttggatggggtggggaggtcgatgaatgagtggttaattaattttattagggggttaattttgcgtattggggtcattggtgttcttgtagttgaaatacaacgat

SEQ ID NO: 74287 - DNA, 120 bp, Homo sapiens
  misc_feature: 665 for SV(C|O) and mtDNA
atcatactctttcacccacagcaccaatcctacctccatcgctaaccccactaaaacactcaccaagacctcaacccctgacccccatgcctcaggatactcctcaatagccatcgctgt

SEQ ID NO: 74288 - DNA, 120 bp, Homo sapiens
  misc_feature: 665 for SV(C|O) and mtDNA
agtttttttcgtgatagtggttcactggataagtggcgttggcttgccatgattgtgaggggtaggagtcaggtagttagtattaggaggggggttgttagggggtcggaggaaaaggtt

SEQ ID NO: 74289 - DNA, 120 bp, Homo sapiens; identical to SEQ ID NO: 59626
  misc_feature: 665 for SV(C|O) and mtDNA

SEQ ID NO: 74290 - DNA, 120 bp, Homo sapiens; identical to SEQ ID NO: 60085
  misc_feature: 665 for SV(C|O) and mtDNA

SEQ ID NO: 74291 - DNA, 120 bp, Homo sapiens
  misc_feature: 664 for SV(C|O) and mtDNA
tttttttcgtgatagtggttcactggataagtggcgttggcttgccatgattgtgaggggtaggagtcaggtagttagtattaggaggggggttgttagggggtcggaggaaaaggttgg

SEQ ID NO: 74292 - DNA, 120 bp, Homo sapiens; identical to SEQ ID NO: 53795
  misc_feature: 664 for SV(C|O) and mtDNA

SEQ ID NO: 74293 - DNA, 120 bp, Homo sapiens
  misc_feature: 664 for SV(C|O) and mtDNA
cccatactccttacactattcctcatcacccaactaaaaatattaaacacaaactaccacctacctccctcaccaaagcccataaaaataaaaaattataacaaaccctgagaaccaaaa

SEQ ID NO: 74294 - DNA, 120 bp, Homo sapiens; identical to SEQ ID NO: 52986
  misc_feature: 664 for SV(C|O) and mtDNA

SEQ ID NO: 74295 - DNA, 120 bp, Homo sapiens
  misc_feature: 664 for SV(C|O) and mtDNA
gtcaaaccacgtctacaaaatgccagtatcaggcggcggcttcgaagccaaagtgatgtttggatgtaaagtgaaatattagttggcggatgaagcagatagtgaggaaagttgagccaa

SEQ ID NO: 74296 - DNA, 120 bp, Homo sapiens
  misc_feature: 664 for SV(C|O) and mtDNA
agctgacacaaaatagactacgaaagtggctttaacatatctgaacacacaatagctaagacccaaactgggattagataccccactatgcttagccctaaacctcaacagttaaatcaa

SEQ ID NO: 74297 - DNA, 120 bp, Homo sapiens
  misc_feature: 664 for SV(C|O) and mtDNA
caaccaccaccccatcatactctttcacccacagcaccaatcctacctccatcgctaaccccactaaaacactcaccaagacctcaacccctgacccccatgcctcaggatactcctcaa

SEQ ID NO: 74298 - DNA, 120 bp, Homo sapiens
  misc_feature: 664 for SV(C|O) and mtDNA
ttcgcttcgaagcgaaggcttctcaaatcatgaaaattattaatattactgctgttagagaaatgaatgagcctacagatgataggatgtttcatgtggtgtatgcatcggggtagtccg

SEQ ID NO: 74299 - DNA, 120 bp, Homo sapiens; identical to SEQ ID NO: 59339
  misc_feature: 664 for SV(C|O) and mtDNA

SEQ ID NO: 74300 - DNA, 120 bp, Homo sapiens; identical to SEQ ID NO: 57006
  misc_feature: 664 for SV(C|O) and mtDNA

SEQ ID NO: 74301 - DNA, 120 bp, Homo sapiens; identical to SEQ ID NO: 56069
  misc_feature: 664 for SV(C|O) and mtDNA

SEQ ID NO: 74302 - DNA, 120 bp, Homo sapiens
  misc_feature: 664 for SV(C|O) and mtDNA
ataatccccatcctccatatatccaaacaacaaagcataatatttcgcccactaagccaatcactttattgactcctagccgcagacctcctcattctaacctgaatcggaggacaacca

SEQ ID NO: 74303 - DNA, 120 bp, Homo sapiens
  misc_feature: 664 for SV(C|O) and mtDNA
ccaccccatcatactctttcacccacagcaccaatcctacctccatcgctaaccccactaaaacactcaccaagacctcaacccctgacccccatgcctcaggatactcctcaatagcca

SEQ ID NO: 74304 - DNA, 120 bp, Homo sapiens
  misc_feature: 664 for SV(C|O) and mtDNA
tgcttgtaagcatggggagggggttttgatgtggattgggtttttatgtactacaggtggtcaagtatttatggtaccgtacaatattcatggtggctggcagtaatgtacgaattacat

SEQ ID NO: 74305 - DNA, 120 bp, Homo sapiens
  misc_feature: 664 for SV(C|O) and mtDNA
tgatttggaggatcaggcaggcgccaaggagtgagccgaagtttcatcatgcggagatgttggatggggtggggaggtcgatgaatgagtggttaattaattttattagggggttaattt

SEQ ID NO: 74306 - DNA, 120 bp, Homo sapiens
  misc_feature: 664 for SV(C|O) and mtDNA
acaaccaccaccccatcatactctttcacccacagcaccaatcctacctccatcgctaaccccactaaaacactcaccaagacctcaacccctgacccccatgcctcaggatactcctca

SEQ ID NO: 74307 - DNA, 120 bp, Homo sapiens
  misc_feature: 664 for SV(C|O) and mtDNA
cctcaaccccgacatcattaccgggttttcctcttgtaaatatagtttaaccaaaacatcagattgtgaatctgacaacagaggcttacgaccccttatttaccgagaaagctcacaaga

SEQ ID NO: 74308 - DNA, 120 bp, Homo sapiens
  misc_feature: 664 for SV(C|O) and mtDNA
tcttcaatcagccacatagccctcgtagtaacagccattctcatccaaaccccctgaagcttcaccggcgcagtcattctcataatcgcccacggacttacatcctcattactattctgc

SEQ ID NO: 74309 - DNA, 120 bp, Homo sapiens; identical to SEQ ID NO: 60457
  misc_feature: 664 for SV(C|O) and mtDNA

SEQ ID NO: 74310 - DNA, 120 bp, Homo sapiens
  misc_feature: 664 for SV(C|O) and mtDNA
atatattgtaattgagattgctcgggggaataggttatgtgattaggagtagggttaggatgagtgggaagaagaaagagaggaagtaaagtttaattatgcctttttgggttgaggtga

SEQ ID NO: 74311 - DNA, 120 bp, Homo sapiens
  misc_feature: 664 for SV(C|O) and mtDNA
tcaatcagccacatagccctcgtagtaacagccattctcatccaaaccccctgaagcttcaccggcgcagtcattctcataatcgcccacggacttacatcctcattactattctgccta

SEQ ID NO: 74312 - DNA, 120 bp, Homo sapiens
  misc_feature: 664 for SV(C|O) and mtDNA
tcaaattcctccctgtacgaaaggacaagagaaataaggcctacttcacaaagcgccttcccccgtaaatgatatcatctcaacttagtattatacccacacccacccaagaacagggtt

SEQ ID NO: 74313 - DNA, 120 bp, Homo sapiens
  misc_feature: 664 for SV(C|O) and mtDNA
tatagctactctcataaccctcaacacccactccctcttagccaatattgtgcctattgccatactagtctttgccgcctgcgaagcagcggtgggcctagccctactagtctcaatctc

SEQ ID NO: 74314 - DNA, 120 bp, Homo sapiens
  misc_feature: 664 for SV(C|O) and mtDNA
tagtacataaagccatttaccgtacatagcacattacagtcaaatcccttctcgtccccatggatgacccccctcagataggggtcccttgaccaccatcctccgtgaaatcaatatccc

SEQ ID NO: 74315 - DNA, 120 bp, Homo sapiens
  misc_feature: 664 for SV(C|O) and mtDNA
taggctatgtgttttgtcagggggttgagaatgagtgtgaggcgtattataccatagccgcctagttttaagagtactgcggcaagtactattgacccagcgatgggggcttcgacatgg

SEQ ID NO: 74316 - DNA, 120 bp, Homo sapiens; identical to SEQ ID NO: 57042
  misc_feature: 664 for SV(C|O) and mtDNA

SEQ ID NO: 74317 - DNA, 120 bp, Homo sapiens
  misc_feature: 664 for SV(C|O) and mtDNA
taaaatagagacccagtaaaattgtaataagcagtgcttgaattatttggtttcggttgttttctattagactatggtgagctcaggtgattgatactcctgatgcgagtaatacggatg

SEQ ID NO: 74318 - DNA, 120 bp, Homo sapiens
  misc_feature: 664 for SV(C|O) and mtDNA
taaaataaaatccccactatgcacattttatttctccaacatactcggattctaccctaccatcacacaccgcacaatcccctatctaggccttcttacgagccaaaacctgcccctact

SEQ ID NO: 74319 - DNA, 120 bp, Homo sapiens; identical to SEQ ID NO: 60782
  misc_feature: 664 for SV(C|O) and mtDNA

SEQ ID NO: 74320 - DNA, 120 bp, Homo sapiens
  misc_feature: 664 for SV(C|O) and mtDNA
gcgctgttatccctagggtaacttgttccgttggtcaagttattggatcaattgagtatagtagttcgctttgactggtgaagtcttagcatgtactgctcggaggttgggttctgctcc

SEQ ID NO: 74321 - DNA, 120 bp, Homo sapiens
  misc_feature: 664 for SV(C|O) and mtDNA
gctcattcatttctctaacagcagtaatattaataattttcatgatttgagaagccttcgcttcgaagcgaaaagtcctaatagtagaagaaccctccataaacctggagtgactatatg

SEQ ID NO: 74322 - DNA, 120 bp, Homo sapiens; identical to SEQ ID NO: 52665
  misc_feature: 664 for SV(C|O) and mtDNA

SEQ ID NO: 74323 - DNA, 120 bp, Homo sapiens; identical to SEQ ID NO: 60834
  misc_feature: 664 for SV(C|O) and mtDNA

SEQ ID NO: 74324 - DNA, 120 bp, Homo sapiens; identical to SEQ ID NO: 56948
  misc_feature: 664 for SV(C|O) and mtDNA

SEQ ID NO: 74325 - DNA, 120 bp, Homo sapiens
  misc_feature: 664 for SV(C|O) and mtDNA
gccggttagcgggggcaggcctcctagggagaggagggtggatggaattaagggtgttagtcatgttagcttgtttcaggtgcgagatagtagtagggtcgtggtgctggagtttaagtt

SEQ ID NO: 74326 - DNA, 120 bp, Homo sapiens; identical to SEQ ID NO: 53217
  misc_feature: 664 for SV(C|O) and mtDNA

SEQ ID NO: 74327 - DNA, 120 bp, Homo sapiens; identical to SEQ ID NO: 56993
  misc_feature: 664 for SV(C|O) and mtDNA

SEQ ID NO: 74328 - DNA, 120 bp, Homo sapiens
  misc_feature: 664 for SV(C|O) and mtDNA
cgcttcgaagcgaaggcttctcaaatcatgaaaattattaatattactgctgttagagaaatgaatgagcctacagatgataggatgtttcatgtggtgtatgcatcggggtagtccgag

SEQ ID NO: 74329 - DNA, 120 bp, Homo sapiens
  misc_feature: 664 for SV(C|O) and mtDNA
ctagccctactagtctcaatctccaacacatatggcctagactacgtacataacctaaacctactccaatgctaaaactaatcgtcccaacaattatattactaccactgacatgacttt

SEQ ID NO: 74330 - DNA, 120 bp, Homo sapiens; identical to SEQ ID NO: 56063
  misc_feature: 664 for SV(C|O) and mtDNA

SEQ ID NO: 74331 - DNA, 120 bp, Homo sapiens; identical to SEQ ID NO: 57183
  misc_feature: 664 for SV(C|O) and mtDNA

SEQ ID NO: 74332 - DNA, 120 bp, Homo sapiens
  misc_feature: 664 for SV(C|O) and mtDNA
ccgtgcaaaggtagcataatcacttgttccttaaatagggacctgtatgaatggctccacgagggttcagctgtctcttacttttaaccagtgaaattgacctgcccgtgaagaggcggg

SEQ ID NO: 74333 - DNA, 120 bp, Homo sapiens
  misc_feature: 664 for SV(C|O) and mtDNA
cccaccggcgtcaaagtatttagctgactcgccacactccacggaagcaatatgaaatgatctgctgcagtgctctgagccctaggattcatctttcttttcaccgtaggcggcctgact

SEQ ID NO: 74334 - DNA, 120 bp, Homo sapiens
  misc_feature: 664 for SV(C|O) and mtDNA
ccaaggacaaatcagagaaaaagtctttaactccaccattagcacccaaagctaagattctaatttaaactattctctgttctttcatggggaagcagatttgggtgccacccaagtatt

SEQ ID NO: 74335 - DNA, 120 bp, Homo sapiens
  misc_feature: 664 for SV(C|O) and mtDNA
catcatactctttcacccacagcaccaatcctacctccatcgctaaccccactaaaacactcaccaagacctcaacccctgacccccatgcctcaggatactcctcaatagccatcgctg

SEQ ID NO: 74336 - DNA, 120 bp, Homo sapiens
  misc_feature: 664 for SV(C|O) and mtDNA
acttttatttggagttgcaccaaaatttttggggcctaagaccaatggatagctgttatcctttaaaagttgagaaagccatgttgttagacatgggggcatgagttagcagttcttgtg

SEQ ID NO: 74337 - DNA, 120 bp, Homo sapiens
  misc_feature: 664 for SV(C|O) and mtDNA
aatagtttaaattagaatcttagctttgggtgctaatggtggagttaaagactttttctctgatttgtccttggaaaaaggttttcatctccggtttacaagactggtgtattagtttat

SEQ ID NO: 74338 - DNA, 120 bp, Homo sapiens
  misc_feature: 664 for SV(C|O) and mtDNA
acaaactaggaggcgtccttgccctattactatccatcctcatcctagcaataatccccatcctccatatatccaaacaacaaagcataatatttcgcccactaagccaatcactttatt

SEQ ID NO: 74339 - DNA, 120 bp, Homo sapiens; identical to SEQ ID NO: 58010
  misc_feature: 663 for SV(C|O) and mtDNA

SEQ ID NO: 74340 - DNA, 120 bp, Homo sapiens
  misc_feature: 663 for SV(C|O) and mtDNA
agtgtagcttaacacaaagcacccaacttacacttaggagatttcaacttaacttgaccgctctgagctaaacctagccccaaacccactccaccttactaccagacaaccttagccaaa

SEQ ID NO: 74341 - DNA, 120 bp, Homo sapiens; identical to SEQ ID NO: 61712
  misc_feature: 663 for SV(C|O) and mtDNA

SEQ ID NO: 74342 - DNA, 120 bp, Homo sapiens; identical to SEQ ID NO: 57473
  misc_feature: 663 for SV(C|O) and mtDNA

SEQ ID NO: 74343 - DNA, 120 bp, Homo sapiens
  misc_feature: 663 for SV(C|O) and mtDNA
ggaatcttcttactcatccgcttccaccccctagcagaaaatagcccactaatccaaactctaacactatgcttaggcgctatcaccactctgttcgcagcagtctgcgcccttacacaa

SEQ ID NO: 74344 - DNA, 120 bp, Homo sapiens; identical to SEQ ID NO: 57348
  misc_feature: 663 for SV(C|O) and mtDNA

SEQ ID NO: 74345 - DNA, 120 bp, Homo sapiens
  misc_feature: 663 for SV(C|O) and mtDNA
ttctccataaaattcttcttagtagctattaccttcttattatttgatctagaaattgccctccttttacccctaccatgagccctacaaacaactaacctaccactaatagttatgtca

SEQ ID NO: 74346 - DNA, 120 bp, Homo sapiens; identical to SEQ ID NO: 59840
  misc_feature: 663 for SV(C|O) and mtDNA

SEQ ID NO: 74347 - DNA, 120 bp, Homo sapiens; identical to SEQ ID NO: 61361
  misc_feature: 663 for SV(C|O) and mtDNA

SEQ ID NO: 74348 - DNA, 120 bp, Homo sapiens; identical to SEQ ID NO: 57379
  misc_feature: 663 for SV(C|O) and mtDNA

SEQ ID NO: 74349 - DNA, 120 bp, Homo sapiens; identical to SEQ ID NO: 55116
  misc_feature: 663 for SV(C|O) and mtDNA

SEQ ID NO: 74350 - DNA, 120 bp, Homo sapiens
  misc_feature: 663 for SV(C|O) and mtDNA
ctacacatcgggcgaggcctatattacggatcatttctctactcagaaacctgaaacatcggcattatcctcctgcttgcaactatagcaacagccttcataggctatgtcctcccgtga

SEQ ID NO: 74351 - DNA, 120 bp, Homo sapiens; identical to SEQ ID NO: 53086
  misc_feature: 663 for SV(C|O) and mtDNA

SEQ ID NO: 74352 - DNA, 120 bp, Homo sapiens
  misc_feature: 663 for SV(C|O) and mtDNA
tatgggtgttaaattttttactctctctacaaggttttttcctagtgtccaaagagctgttcctctttggactaacagttaaatttacaaggggatttagagggttctgtgggcaaattt

SEQ ID NO: 74353 - DNA, 120 bp, Homo sapiens; identical to SEQ ID NO: 60324
  misc_feature: 663 for SV(C|O) and mtDNA

SEQ ID NO: 74354 - DNA, 120 bp, Homo sapiens
  misc_feature: 663 for SV(C|O) and mtDNA
taggattgcgctgttatccctagggtaacttgttccgttggtcaagttattggatcaattgagtatagtagttcgctttgactggtgaagtcttagcatgtactgctcggaggttgggtt

SEQ ID NO: 74355 - DNA, 120 bp, Homo sapiens; identical to SEQ ID NO: 55541
  misc_feature: 663 for SV(C|O) and mtDNA

SEQ ID NO: 74356 - DNA, 120 bp, Homo sapiens
  misc_feature: 663 for SV(C|O) and mtDNA
aaagtatttagctgactcgccacactccacggaagcaatatgaaatgatctgctgcagtgctctgagccctaggattcatctttcttttcaccgtaggcggcctgactggcattgtatta

SEQ ID NO: 74357 - DNA, 120 bp, Homo sapiens
  misc_feature: 663 for SV(C|O) and mtDNA
taagtattgcaacttactgagggctttgaaggctcttggtctgtatttaacctaaatttctataagattattagtataaaaggggagataggtaggagtagcgtggtaagggcgatgagt

SEQ ID NO: 74358 - DNA, 120 bp, Homo sapiens; identical to SEQ ID NO: 55596
  misc_feature: 663 for SV(C|O) and mtDNA

SEQ ID NO: 74359 - DNA, 120 bp, Homo sapiens
  misc_feature: 663 for SV(C|O) and mtDNA
atgggtgttaaattttttactctctctacaaggttttttcctagtgtccaaagagctgttcctctttggactaacagttaaatttacaaggggatttagagggttctgtgggcaaattta

SEQ ID NO: 74360 - DNA, 120 bp, Homo sapiens
  misc_feature: 663 for SV(C|O) and mtDNA
cccaactatctataaacctagccatggccatccccttatgagcgggcgcagtgattataggctttcgctctaagattaaaaatgccctagcccacttcttaccacaaggcacacctacac

SEQ ID NO: 74361 - DNA, 120 bp, Homo sapiens
  misc_feature: 663 for SV(C|O) and mtDNA
agatgaaaaattataaccaagcataatacagcaaggactaacccctataccttctgcataatgaattaactagaaataactttgcaaggagagccaaagctaagacccccgaaaccagac

SEQ ID NO: 74362 - DNA, 120 bp, Homo sapiens; identical to SEQ ID NO: 54735
  misc_feature: 663 for SV(C|O) and mtDNA

SEQ ID NO: 74363 - DNA, 120 bp, Homo sapiens
  misc_feature: 663 for SV(C|O) and mtDNA
cacgtctacaaaatgccagtatcaggcggcggcttcgaagccaaagtgatgtttggatgtaaagtgaaatattagttggcggatgaagcagatagtgaggaaagttgagccaataatgac

SEQ ID NO: 74364 - DNA, 120 bp, Homo sapiens; identical to SEQ ID NO: 61837
  misc_feature: 663 for SV(C|O) and mtDNA

SEQ ID NO: 74365 - DNA, 120 bp, Homo sapiens
  misc_feature: 663 for SV(C|O) and mtDNA
agcaggaatcttcttactcatccgcttccaccccctagcagaaaatagcccactaatccaaactctaacactatgcttaggcgctatcaccactctgttcgcagcagtctgcgcccttac

SEQ ID NO: 74366 - DNA, 120 bp, Homo sapiens
  misc_feature: 663 for SV(C|O) and mtDNA
ggttagtaggcctagtatgaggagcgttatggagtggaagtgaaatcacatggctaggccggaggtcattaggagggctgagagggcccctgttaggggtcatgggctgggttttactat

SEQ ID NO: 74367 - DNA, 120 bp, Homo sapiens
  misc_feature: 663 for SV(C|O) and mtDNA
gccaccatcaccctccttaacctctacttctacctacgcctaatctactccacctcaatcacactactccccatatctaacaacgtaaaaataaaatgacagtttgaacatacaaaaccc

SEQ ID NO: 74368 - DNA, 120 bp, Homo sapiens; identical to SEQ ID NO: 56447
  misc_feature: 663 for SV(C|O) and mtDNA

SEQ ID NO: 74369 - DNA, 120 bp, Homo sapiens; identical to SEQ ID NO: 52960
  misc_feature: 663 for SV(C|O) and mtDNA

SEQ ID NO: 74370 - DNA, 120 bp, Homo sapiens; identical to SEQ ID NO: 58567
  misc_feature: 663 for SV(C|O) and mtDNA

SEQ ID NO: 74371 - DNA, 120 bp, Homo sapiens
  misc_feature: 663 for SV(C|O) and mtDNA
catcaccagtattagaggcaccgcctgcccagtgacacatgtttaacggccgcggtaccctaaccgtgcaaaggtagcataatcacttgttccttaaatagggacctgtatgaatggctc

SEQ ID NO: 74372 - DNA, 120 bp, Homo sapiens; identical to SEQ ID NO: 52965
  misc_feature: 663 for SV(C|O) and mtDNA

SEQ ID NO: 74373 - DNA, 120 bp, Homo sapiens; identical to SEQ ID NO: 58069
  misc_feature: 663 for SV(C|O) and mtDNA

SEQ ID NO: 74374 - DNA, 120 bp, Homo sapiens
  misc_feature: 663 for SV(C|O) and mtDNA
cgggggaataggttatgtgattaggagtagggttaggatgagtgggaagaagaaagagaggaagtaaagtttaattatgcctttttgggttgaggtgatgatggaggtggagatttggtg

SEQ ID NO: 74375 - DNA, 120 bp, Homo sapiens; identical to SEQ ID NO: 52890
  misc_feature: 663 for SV(C|O) and mtDNA

SEQ ID NO: 74376 - DNA, 120 bp, Homo sapiens
  misc_feature: 663 for SV(C|O) and mtDNA
caccccatcatactctttcacccacagcaccaatcctacctccatcgctaaccccactaaaacactcaccaagacctcaacccctgacccccatgcctcaggatactcctcaatagccat

SEQ ID NO: 74377 - DNA, 120 bp, Homo sapiens
  misc_feature: 663 for SV(C|O) and mtDNA
atactctttcacccacagcaccaatcctacctccatcgctaaccccactaaaacactcaccaagacctcaacccctgacccccatgcctcaggatactcctcaatagccatcgctgtagt

SEQ ID NO: 74378 - DNA, 120 bp, Homo sapiens; identical to SEQ ID NO: 58903
  misc_feature: 663 for SV(C|O) and mtDNA

SEQ ID NO: 74379 - DNA, 120 bp, Homo sapiens; identical to SEQ ID NO: 53439
  misc_feature: 662 for SV(C|O) and mtDNA

SEQ ID NO: 74380 - DNA, 120 bp, Homo sapiens; identical to SEQ ID NO: 53556
  misc_feature: 662 for SV(C|O) and mtDNA

SEQ ID NO: 74381 - DNA, 120 bp, Homo sapiens; identical to SEQ ID NO: 54593
  misc_feature: 662 for SV(C|O) and mtDNA

SEQ ID NO: 74382 - DNA, 120 bp, Homo sapiens
  misc_feature: 662 for SV(C|O) and mtDNA
ttggttagtaggcctagtatgaggagcgttatggagtggaagtgaaatcacatggctaggccggaggtcattaggagggctgagagggcccctgttaggggtcatgggctgggttttact

SEQ ID NO: 74383 - DNA, 120 bp, Homo sapiens
  misc_feature: 662 for SV(C|O) and mtDNA
ttgactgtaatgtgctatgtacggtaaatggctttatgtactatgtgctgttaagggtgagtaggtttgttggtatcctagtgggtgaggggtggctttggagttgcagttgatgtgtga

SEQ ID NO: 74384 - DNA, 120 bp, Homo sapiens; identical to SEQ ID NO: 57758
  misc_feature: 662 for SV(C|O) and mtDNA

SEQ ID NO: 74385 - DNA, 120 bp, Homo sapiens
  misc_feature: 662 for SV(C|O) and mtDNA
acactaggaaaaaaccttgtagagagagtaaaaaatttaacacccatagtaggcctaaaagcagccaccaattaagaaagcgttcaagctcaacacccactacctaaaaaatcccaaaca

SEQ ID NO: 74386 - DNA, 120 bp, Homo sapiens; identical to SEQ ID NO: 57167
  misc_feature: 662 for SV(C|O) and mtDNA

SEQ ID NO: 74387 - DNA, 120 bp, Homo sapiens; identical to SEQ ID NO: 55232
  misc_feature: 662 for SV(C|O) and mtDNA

SEQ ID NO: 74388 - DNA, 120 bp, Homo sapiens; identical to SEQ ID NO: 57600
  misc_feature: 662 for SV(C|O) and mtDNA

SEQ ID NO: 74389 - DNA, 120 bp, Homo sapiens
  misc_feature: 662 for SV(C|O) and mtDNA
tgcgctgttatccctagggtaacttgttccgttggtcaagttattggatcaattgagtatagtagttcgctttgactggtgaagtcttagcatgtactgctcggaggttgggttctgctc

SEQ ID NO: 74390 - DNA, 120 bp, Homo sapiens
  misc_feature: 662 for SV(C|O) and mtDNA
ccggcgtcaaagtatttagctgactcgccacactccacggaagcaatatgaaatgatctgctgcagtgctctgagccctaggattcatctttcttttcaccgtaggcggcctgactggca

SEQ ID NO: 74391 - DNA, 120 bp, Homo sapiens
  misc_feature: 662 for SV(C|O) and mtDNA
tgatccgtaatataggcctcgcccgatgtgtaggaagaggcagataaagaatattgaggcgccattggcgtgaaggtagcggatgattcagccataatttacgtctcgagtgatgtgggc

SEQ ID NO: 74392 - DNA, 120 bp, Homo sapiens
  misc_feature: 662 for SV(C|O) and mtDNA
atgaaaaattataaccaagcataatacagcaaggactaacccctataccttctgcataatgaattaactagaaataactttgcaaggagagccaaagctaagacccccgaaaccagacga

SEQ ID NO: 74393 - DNA, 120 bp, Homo sapiens; identical to SEQ ID NO: 54036
  misc_feature: 662 for SV(C|O) and mtDNA

SEQ ID NO: 74394 - DNA, 120 bp, Homo sapiens
  misc_feature: 662 for SV(C|O) and mtDNA
tagtctaatagaaaacaaccgaaaccaaataattcaagcactgcttattacaattttactgggtctctattttaccctcctacaagcctcagagtacttcgagtctcccttcaccatttc

SEQ ID NO: 74395 - DNA, 120 bp, Homo sapiens; identical to SEQ ID NO: 55026
  misc_feature: 662 for SV(C|O) and mtDNA

SEQ ID NO: 74396 - DNA, 120 bp, Homo sapiens; identical to SEQ ID NO: 61652
  misc_feature: 662 for SV(C|O) and mtDNA

SEQ ID NO: 74397 - DNA, 120 bp, Homo sapiens; identical to SEQ ID NO: 55942
  misc_feature: 662 for SV(C|O) and mtDNA

SEQ ID NO: 74398 - DNA, 120 bp, Homo sapiens
  misc_feature: 662 for SV(C|O) and mtDNA
cgtcggaaatggtgaagggagactcgaagtactctgaggcttgtaggagggtaaaatagagacccagtaaaattgtaataagcagtgcttgaattatttggtttcggttgttttctatta

SEQ ID NO: 74399 - DNA, 120 bp, Homo sapiens; identical to SEQ ID NO: 57305
  misc_feature: 662 for SV(C|O) and mtDNA

SEQ ID NO: 74400 - DNA, 120 bp, Homo sapiens; identical to SEQ ID NO: 61550
  misc_feature: 662 for SV(C|O) and mtDNA

SEQ ID NO: 74401 - DNA, 120 bp, Homo sapiens
  misc_feature: 662 for SV(C|O) and mtDNA
caggaatcttcttactcatccgcttccaccccctagcagaaaatagcccactaatccaaactctaacactatgcttaggcgctatcaccactctgttcgcagcagtctgcgcccttacac

SEQ ID NO: 74402 - DNA, 120 bp, Homo sapiens
  misc_feature: 662 for SV(C|O) and mtDNA
aaaaatgccctagcccacttcttaccacaaggcacacctacaccccttatccccatactagttattatcgaaaccatcagcctactcattcaaccaatagccctggccgtacgcctaacc

SEQ ID NO: 74403 - DNA, 120 bp, Homo sapiens
  misc_feature: 662 for SV(C|O) and mtDNA
ccaactatctataaacctagccatggccatccccttatgagcgggcgcagtgattataggctttcgctctaagattaaaaatgccctagcccacttcttaccacaaggcacacctacacc

SEQ ID NO: 74404 - DNA, 120 bp, Homo sapiens
  misc_feature: 662 for SV(C|O) and mtDNA
caaccacgaccaatgatatgaaaaaccatcgttgtatttcaactacaagaacaccaatgaccccaatacgcaaaattaaccccctaataaaattaattaaccactcattcatcgacctcc

SEQ ID NO: 74405 - DNA, 120 bp, Homo sapiens
  misc_feature: 662 for SV(C|O) and mtDNA
cttatccccatactagttattatcgaaaccatcagcctactcattcaaccaatagccctggccgtacgcctaaccgctaacattactgcaggccacctactcatgcacctaattggaagc

SEQ ID NO: 74406 - DNA, 120 bp, Homo sapiens; identical to SEQ ID NO: 56876
  misc_feature: 662 for SV(C|O) and mtDNA

SEQ ID NO: 74407 - DNA, 120 bp, Homo sapiens; identical to SEQ ID NO: 56848
  misc_feature: 662 for SV(C|O) and mtDNA

SEQ ID NO: 74408 - DNA, 120 bp, Homo sapiens
  misc_feature: 662 for SV(C|O) and mtDNA
acttttaaaggataacagctatccattggtcttaggccccaaaaattttggtgcaactccaaataaaagtaacaaccatgcacactactataaccaccctaaccctgacttccctaattc

SEQ ID NO: 74409 - DNA, 120 bp, Homo sapiens; identical to SEQ ID NO: 58272
  misc_feature: 662 for SV(C|O) and mtDNA

SEQ ID NO: 74410 - DNA, 120 bp, Homo sapiens
  misc_feature: 662 for SV(C|O) and mtDNA
cagtattagaggcaccgcctgcccagtgacacatgtttaacggccgcggtaccctaaccgtgcaaaggtagcataatcacttgttccttaaatagggacctgtatgaatggctccacgag

SEQ ID NO: 74411 - DNA, 120 bp, Homo sapiens
  misc_feature: 662 for SV(C|O) and mtDNA
cctacacatcgggcgaggcctatattacggatcatttctctactcagaaacctgaaacatcggcattatcctcctgcttgcaactatagcaacagccttcataggctatgtcctcccgtg

SEQ ID NO: 74412 - DNA, 120 bp, Homo sapiens
  misc_feature: 662 for SV(C|O) and mtDNA
cctaacaggggccctctcagccctcctaatgacctccggcctagccatgtgatttcacttccactccataacgctcctcatactaggcctactaaccaacacactaaccatataccaatg

SEQ ID NO: 74413 - DNA, 120 bp, Homo sapiens
  misc_feature: 662 for SV(C|O) and mtDNA
catactccttacactattcctcatcacccaactaaaaatattaaacacaaactaccacctacctccctcaccaaagcccataaaaataaaaaattataacaaaccctgagaaccaaaatg

SEQ ID NO: 74414 - DNA, 120 bp, Homo sapiens
  misc_feature: 662 for SV(C|O) and mtDNA
caaggacaaatcagagaaaaagtctttaactccaccattagcacccaaagctaagattctaatttaaactattctctgttctttcatggggaagcagatttgggtgccacccaagtattg

SEQ ID NO: 74415 - DNA, 120 bp, Homo sapiens; identical to SEQ ID NO: 56242
  misc_feature: 662 for SV(C|O) and mtDNA

SEQ ID NO: 74416 - DNA, 120 bp, Homo sapiens
  misc_feature: 662 for SV(C|O) and mtDNA
aaccctccataaacctggagtgactatatggatgccccccaccctaccacacattcgaagaacccgtatacataaaatctagacaaaaaaggaaggaatcgaaccccccaaagctggttt

SEQ ID NO: 74417 - DNA, 120 bp, Homo sapiens
  misc_feature: 661 for SV(C|O) and mtDNA
tgatatgaaaaaccatcgttgtatttcaactacaagaacaccaatgaccccaatacgcaaaattaaccccctaataaaattaattaaccactcattcatcgacctccccaccccatccaa

SEQ ID NO: 74418 - DNA, 120 bp, Homo sapiens
  misc_feature: 661 for SV(C|O) and mtDNA
ttgcgctgttatccctagggtaacttgttccgttggtcaagttattggatcaattgagtatagtagttcgctttgactggtgaagtcttagcatgtactgctcggaggttgggttctgct

SEQ ID NO: 74419 - DNA, 120 bp, Homo sapiens
  misc_feature: 661 for SV(C|O) and mtDNA
acatctccgcatgatgaaacttcggctcactccttggcgcctgcctgatcctccaaatcaccacaggactattcctagccatgcactactcaccagacgcctcaaccgccttttcatcaa

SEQ ID NO: 74420 - DNA, 120 bp, Homo sapiens; identical to SEQ ID NO: 57003
  misc_feature: 661 for SV(C|O) and mtDNA

SEQ ID NO: 74421 - DNA, 120 bp, Homo sapiens
  misc_feature: 661 for SV(C|O) and mtDNA
aggtagagtttttttcgtgatagtggttcactggataagtggcgttggcttgccatgattgtgaggggtaggagtcaggtagttagtattaggaggggggttgttagggggtcggaggaa

SEQ ID NO: 74422 - DNA, 120 bp, Homo sapiens
  misc_feature: 661 for SV(C|O) and mtDNA
ttcaccgtaggcggcctgactggcattgtattagcaaactcatcactagacatcgtactacacgacacgtactacgttgtagctcacttccactatgtcctatcaataggagctgtattt

SEQ ID NO: 74423 - DNA, 120 bp, Homo sapiens; identical to SEQ ID NO: 53560
  misc_feature: 661 for SV(C|O) and mtDNA

SEQ ID NO: 74424 - DNA, 120 bp, Homo sapiens; identical to SEQ ID NO: 58795
  misc_feature: 661 for SV(C|O) and mtDNA

SEQ ID NO: 74425 - DNA, 120 bp, Homo sapiens
  misc_feature: 661 for SV(C|O) and mtDNA
ttatccccatactagttattatcgaaaccatcagcctactcattcaaccaatagccctggccgtacgcctaaccgctaacattactgcaggccacctactcatgcacctaattggaagcg

SEQ ID NO: 74426 - DNA, 120 bp, Homo sapiens; identical to SEQ ID NO: 61488
  misc_feature: 661 for SV(C|O) and mtDNA

SEQ ID NO: 74427 - DNA, 120 bp, Homo sapiens
  misc_feature: 661 for SV(C|O) and mtDNA
ttaaaataaaatccccactatgcacattttatttctccaacatactcggattctaccctaccatcacacaccgcacaatcccctatctaggccttcttacgagccaaaacctgcccctac

SEQ ID NO: 74428 - DNA, 120 bp, Homo sapiens
  misc_feature: 661 for SV(C|O) and mtDNA
tgcacgcgatagcattgcgagacgctggagccggagcaccctatgtcgcagtatctgtctttgattcctgcctcatcctattatttatcgcacctacgttcaatattacagacgaacata

SEQ ID NO: 74429 - DNA, 120 bp, Homo sapiens; identical to SEQ ID NO: 58650
  misc_feature: 661 for SV(C|O) and mtDNA

SEQ ID NO: 74430 - DNA, 120 bp, Homo sapiens; identical to SEQ ID NO: 57135
  misc_feature: 661 for SV(C|O) and mtDNA

SEQ ID NO: 74431 - DNA, 120 bp, Homo sapiens
  misc_feature: 661 for SV(C|O) and mtDNA
cgtaaaccctattgttgatatggactctagaataggattgcgctgttatccctagggtaacttgttccgttggtcaagttattggatcaattgagtatagtagttcgctttgactggtga

SEQ ID NO: 74432 - DNA, 120 bp, Homo sapiens; identical to SEQ ID NO: 57330
  misc_feature: 661 for SV(C|O) and mtDNA

SEQ ID NO: 74433 - DNA, 120 bp, Homo sapiens
  misc_feature: 661 for SV(C|O) and mtDNA
tcaaactcctgagccaacaacttaatatgactagcttacacaatagcttttatagtaaagatacctctttacggactccacttatgactccctaaagcccatgtcgaagcccccatcgct

SEQ ID NO: 74434 - DNA, 120 bp, Homo sapiens; identical to SEQ ID NO: 53245
  misc_feature: 661 for SV(C|O) and mtDNA

SEQ ID NO: 74435 - DNA, 120 bp, Homo sapiens
  misc_feature: 661 for SV(C|O) and mtDNA
tatgcttggttataatttttcatctttcccttgcggtactatatctattgcgccaggtttcaatttctatcgcctatactttatttgggtaaatggtttggctaaggttgtctggtagta

SEQ ID NO: 74436 - DNA, 120 bp, Homo sapiens
  misc_feature: 661 for SV(C|O) and mtDNA
tatccccatactagttattatcgaaaccatcagcctactcattcaaccaatagccctggccgtacgcctaaccgctaacattactgcaggccacctactcatgcacctaattggaagcgc

SEQ ID NO: 74437 - DNA, 120 bp, Homo sapiens; identical to SEQ ID NO: 59142
  misc_feature: 661 for SV(C|O) and mtDNA

SEQ ID NO: 74438 - DNA, 120 bp, Homo sapiens; identical to SEQ ID NO: 58170
  misc_feature: 661 for SV(C|O) and mtDNA

SEQ ID NO: 74439 - DNA, 120 bp, Homo sapiens
  misc_feature: 661 for SV(C|O) and mtDNA
tactcttcaatcagccacatagccctcgtagtaacagccattctcatccaaaccccctgaagcttcaccggcgcagtcattctcataatcgcccacggacttacatcctcattactattc

SEQ ID NO: 74440 - DNA, 120 bp, Homo sapiens; identical to SEQ ID NO: 52290
  misc_feature: 661 for SV(C|O) and mtDNA

SEQ ID NO: 74441 - DNA, 120 bp, Homo sapiens
  misc_feature: 661 for SV(C|O) and mtDNA
taaggcgacagcgatttctaggatagtcagtagaattagaattgtgaagatgataagtgtagagggaaggttaatggttgatattgctagggtggcgcttccaattaggtgcatgagtag

SEQ ID NO: 74442 - DNA, 120 bp, Homo sapiens; identical to SEQ ID NO: 56251
  misc_feature: 661 for SV(C|O) and mtDNA

SEQ ID NO: 74443 - DNA, 120 bp, Homo sapiens; identical to SEQ ID NO: 54689
  misc_feature: 661 for SV(C|O) and mtDNA

SEQ ID NO: 74444 - DNA, 120 bp, Homo sapiens; identical to SEQ ID NO: 53765
  misc_feature: 661 for SV(C|O) and mtDNA

SEQ ID NO: 74445 - DNA, 120 bp, Homo sapiens
  misc_feature: 661 for SV(C|O) and mtDNA
caccagtattagaggcaccgcctgcccagtgacacatgtttaacggccgcggtaccctaaccgtgcaaaggtagcataatcacttgttccttaaatagggacctgtatgaatggctccac

SEQ ID NO: 74446 - DNA, 120 bp, Homo sapiens
  misc_feature: 661 for SV(C|O) and mtDNA
gtcagcgaagggttgtagtagcccgtaggggcctacaacgttggggcctttgcgtagttgtatatagcctagaatttttcgttcggtaagcattaggaatgccattgcgattagaatggg

SEQ ID NO: 74447 - DNA, 120 bp, Homo sapiens
  misc_feature: 661 for SV(C|O) and mtDNA
cacccaactatctataaacctagccatggccatccccttatgagcgggcgcagtgattataggctttcgctctaagattaaaaatgccctagcccacttcttaccacaaggcacacctac

SEQ ID NO: 74448 - DNA, 120 bp, Homo sapiens
  misc_feature: 661 for SV(C|O) and mtDNA
acagctatccattggtcttaggccccaaaaattttggtgcaactccaaataaaagtaacaaccatgcacactactataaccaccctaaccctgacttccctaattccccccatccttacc

SEQ ID NO: 74449 - DNA, 120 bp, Homo sapiens; identical to SEQ ID NO: 55995
  misc_feature: 661 for SV(C|O) and mtDNA

SEQ ID NO: 74450 - DNA, 120 bp, Homo sapiens; identical to SEQ ID NO: 56023
  misc_feature: 661 for SV(C|O) and mtDNA

SEQ ID NO: 74451 - DNA, 120 bp, Homo sapiens; identical to SEQ ID NO: 57242
  misc_feature: 661 for SV(C|O) and mtDNA

SEQ ID NO: 74452 - DNA, 120 bp, Homo sapiens
  misc_feature: 661 for SV(C|O) and mtDNA
cacatcgggcgaggcctatattacggatcatttctctactcagaaacctgaaacatcggcattatcctcctgcttgcaactatagcaacagccttcataggctatgtcctcccgtgaggc

SEQ ID NO: 74453 - DNA, 120 bp, Homo sapiens
  misc_feature: 661 for SV(C|O) and mtDNA
cttccaaacaacaatccccctctacctaaaactcacagccctcgctgtcactttcctaggacttctaacagccctagacctcaactacctaaccaacaaacttaaaataaaatccccact

SEQ ID NO: 74454 - DNA, 120 bp, Homo sapiens
  misc_feature: 661 for SV(C|O) and mtDNA
ctgctaaatccaccttcgacccttaagtttcataagggctatcgtagttttctggggtagaaaatgtagcccatttcttgccacctcatgggctacaccttgacctaacgtctttacgtg

SEQ ID NO: 74455 - DNA, 120 bp, Homo sapiens; identical to SEQ ID NO: 53096
  misc_feature: 661 for SV(C|O) and mtDNA

SEQ ID NO: 74456 - DNA, 120 bp, Homo sapiens
  misc_feature: 661 for SV(C|O) and mtDNA
ccggttagcgggggcaggcctcctagggagaggagggtggatggaattaagggtgttagtcatgttagcttgtttcaggtgcgagatagtagtagggtcgtggtgctggagtttaagttg

SEQ ID NO: 74457 - DNA, 120 bp, Homo sapiens; identical to SEQ ID NO: 62458
  misc_feature: 661 for SV(C|O) and mtDNA

SEQ ID NO: 74458 - DNA, 120 bp, Homo sapiens
  misc_feature: 661 for SV(C|O) and mtDNA
atcccttctcgtccccatggatgacccccctcagataggggtcccttgaccaccatcctccgtgaaatcaatatcccgcacaagagtgctactctcctcgctccgggcccataacacttg

SEQ ID NO: 74459 - DNA, 120 bp, Homo sapiens
  misc_feature: 661 for SV(C|O) and mtDNA
aacgtaggcttggattaaggcgacagcgatttctaggatagtcagtagaattagaattgtgaagatgataagtgtagagggaaggttaatggttgatattgctagggtggcgcttccaat

SEQ ID NO: 74460 - DNA, 120 bp, Homo sapiens
  misc_feature: 661 for SV(C|O) and mtDNA
attcgggaggatcctattggtgcgggggctttgtatgattatgggcgttgattagtagtagttactggttgaacattgtttgttggtgtatatattgtaattgagattgctcgggggaat

SEQ ID NO: 74461 - DNA, 120 bp, Homo sapiens; identical to SEQ ID NO: 52481
  misc_feature: 661 for SV(C|O) and mtDNA

SEQ ID NO: 74462 - DNA, 120 bp, Homo sapiens
  misc_feature: 661 for SV(C|O) and mtDNA
actcttcaatcagccacatagccctcgtagtaacagccattctcatccaaaccccctgaagcttcaccggcgcagtcattctcataatcgcccacggacttacatcctcattactattct

SEQ ID NO: 74463 - DNA, 120 bp, Homo sapiens
  misc_feature: 660 for SV(C|O) and mtDNA
ccccatactccttacactattcctcatcacccaactaaaaatattaaacacaaactaccacctacctccctcaccaaagcccataaaaataaaaaattataacaaaccctgagaaccaaa

SEQ ID NO: 74464 - DNA, 120 bp, Homo sapiens; identical to SEQ ID NO: 52082
  misc_feature: 660 for SV(C|O) and mtDNA

SEQ ID NO: 74465 - DNA, 120 bp, Homo sapiens
  misc_feature: 660 for SV(C|O) and mtDNA
gagtgtagcttaacacaaagcacccaacttacacttaggagatttcaacttaacttgaccgctctgagctaaacctagccccaaacccactccaccttactaccagacaaccttagccaa

SEQ ID NO: 74466 - DNA, 120 bp, Homo sapiens
  misc_feature: 660 for SV(C|O) and mtDNA
ttcttttcaccgtaggcggcctgactggcattgtattagcaaactcatcactagacatcgtactacacgacacgtactacgttgtagctcacttccactatgtcctatcaataggagctg

SEQ ID NO: 74467 - DNA, 120 bp, Homo sapiens
  misc_feature: 660 for SV(C|O) and mtDNA
gattcgggaggatcctattggtgcgggggctttgtatgattatgggcgttgattagtagtagttactggttgaacattgtttgttggtgtatatattgtaattgagattgctcgggggaa

SEQ ID NO: 74468 - DNA, 120 bp, Homo sapiens
  misc_feature: 660 for SV(C|O) and mtDNA
ttccaaacaacaatccccctctacctaaaactcacagccctcgctgtcactttcctaggacttctaacagccctagacctcaactacctaaccaacaaacttaaaataaaatccccacta

SEQ ID NO: 74469 - DNA, 120 bp, Homo sapiens
  misc_feature: 660 for SV(C|O) and mtDNA
ttattgctatagccattatgattattaatgatgagtattgattggtagtattggttatggttcattgtccggagagtatattgttgaagaggatagctattagaaggattatggatgcgg

SEQ ID NO: 74470 - DNA, 120 bp, Homo sapiens
  misc_feature: 660 for SV(C|O) and mtDNA
tgggtgttaaattttttactctctctacaaggttttttcctagtgtccaaagagctgttcctctttggactaacagttaaatttacaaggggatttagagggttctgtgggcaaatttaa

SEQ ID NO: 74471 - DNA, 120 bp, Homo sapiens
  misc_feature: 660 for SV(C|O) and mtDNA
taggcggcctgactggcattgtattagcaaactcatcactagacatcgtactacacgacacgtactacgttgtagctcacttccactatgtcctatcaataggagctgtatttgccatca

SEQ ID NO: 74472 - DNA, 120 bp, Homo sapiens; identical to SEQ ID NO: 56626
  misc_feature: 660 for SV(C|O) and mtDNA

SEQ ID NO: 74473 - DNA, 120 bp, Homo sapiens
  misc_feature: 660 for SV(C|O) and mtDNA
tccgagcagtacatgctaagacttcaccagtcaaagcgaactactatactcaattgatccaataacttgaccaacggaacaagttaccctagggataacagcgcaatcctattctagagt

SEQ ID NO: 74474 - DNA, 120 bp, Homo sapiens
  misc_feature: 660 for SV(C|O) and mtDNA
atactccttacactattcctcatcacccaactaaaaatattaaacacaaactaccacctacctccctcaccaaagcccataaaaataaaaaattataacaaaccctgagaaccaaaatga

SEQ ID NO: 74475 - DNA, 120 bp, Homo sapiens; identical to SEQ ID NO: 62447
  misc_feature: 660 for SV(C|O) and mtDNA

SEQ ID NO: 74476 - DNA, 120 bp, Homo sapiens; identical to SEQ ID NO: 57406
  misc_feature: 660 for SV(C|O) and mtDNA

SEQ ID NO: 74477 - DNA, 120 bp, Homo sapiens; identical to SEQ ID NO: 55486
  misc_feature: 660 for SV(C|O) and mtDNA

SEQ ID NO: 74478 - DNA, 120 bp, Homo sapiens; identical to SEQ ID NO: 56540
  misc_feature: 660 for SV(C|O) and mtDNA

SEQ ID NO: 74479 - DNA, 120 bp, Homo sapiens
  misc_feature: 660 for SV(C|O) and mtDNA
tagccctactagtctcaatctccaacacatatggcctagactacgtacataacctaaacctactccaatgctaaaactaatcgtcccaacaattatattactaccactgacatgactttc

SEQ ID NO: 74480 - DNA, 120 bp, Homo sapiens
  misc_feature: 660 for SV(C|O) and mtDNA
taatccccatcctccatatatccaaacaacaaagcataatatttcgcccactaagccaatcactttattgactcctagccgcagacctcctcattctaacctgaatcggaggacaaccag

SEQ ID NO: 74481 - DNA, 120 bp, Homo sapiens
  misc_feature: 660 for SV(C|O) and mtDNA
caataatccccatcctccatatatccaaacaacaaagcataatatttcgcccactaagccaatcactttattgactcctagccgcagacctcctcattctaacctgaatcggaggacaac

SEQ ID NO: 74482 - DNA, 120 bp, Homo sapiens
  misc_feature: 660 for SV(C|O) and mtDNA
gtcggaaatggtgaagggagactcgaagtactctgaggcttgtaggagggtaaaatagagacccagtaaaattgtaataagcagtgcttgaattatttggtttcggttgttttctattag

SEQ ID NO: 74483 - DNA, 120 bp, Homo sapiens
  misc_feature: 660 for SV(C|O) and mtDNA
gcacgcgatagcattgcgagacgctggagccggagcaccctatgtcgcagtatctgtctttgattcctgcctcatcctattatttatcgcacctacgttcaatattacagacgaacatac

SEQ ID NO: 74484 - DNA, 120 bp, Homo sapiens; identical to SEQ ID NO: 54369
  misc_feature: 660 for SV(C|O) and mtDNA

SEQ ID NO: 74485 - DNA, 120 bp, Homo sapiens
  misc_feature: 660 for SV(C|O) and mtDNA
accacgaccaatgatatgaaaaaccatcgttgtatttcaactacaagaacaccaatgaccccaatacgcaaaattaaccccctaataaaattaattaaccactcattcatcgacctcccc

SEQ ID NO: 74486 - DNA, 120 bp, Homo sapiens; identical to SEQ ID NO: 60299
  misc_feature: 660 for SV(C|O) and mtDNA

SEQ ID NO: 74487 - DNA, 120 bp, Homo sapiens
  misc_feature: 660 for SV(C|O) and mtDNA
ggacatcccgatggtgcagccgctattaaaggttcgtttgttcaacgattaaagtcctacgtgatctgagttcagaccggagtaatccaggtcggtttctatctacttcaaattcctccc

SEQ ID NO: 74488 - DNA, 120 bp, Homo sapiens
  misc_feature: 660 for SV(C|O) and mtDNA
caatagatatagtaccgcaagggaaagatgaaaaattataaccaagcataatacagcaaggactaacccctataccttctgcataatgaattaactagaaataactttgcaaggagagcc

SEQ ID NO: 74489 - DNA, 120 bp, Homo sapiens
  misc_feature: 660 for SV(C|O) and mtDNA
ggataacagctatccattggtcttaggccccaaaaattttggtgcaactccaaataaaagtaacaaccatgcacactactataaccaccctaaccctgacttccctaattccccccatcc

SEQ ID NO: 74490 - DNA, 120 bp, Homo sapiens; identical to SEQ ID NO: 60112
  misc_feature: 660 for SV(C|O) and mtDNA

SEQ ID NO: 74491 - DNA, 120 bp, Homo sapiens
  misc_feature: 660 for SV(C|O) and mtDNA
ccttactaccagacaaccttagccaaaccatttacccaaataaagtataggcgatagaaattgaaacctggcgcaatagatatagtaccgcaagggaaagatgaaaaattataaccaagc

SEQ ID NO: 74492 - DNA, 120 bp, Homo sapiens
  misc_feature: 660 for SV(C|O) and mtDNA
gcaatagatatagtaccgcaagggaaagatgaaaaattataaccaagcataatacagcaaggactaacccctataccttctgcataatgaattaactagaaataactttgcaaggagagc

SEQ ID NO: 74493 - DNA, 120 bp, Homo sapiens
  misc_feature: 660 for SV(C|O) and mtDNA
gaaaaattataaccaagcataatacagcaaggactaacccctataccttctgcataatgaattaactagaaataactttgcaaggagagccaaagctaagacccccgaaaccagacgagc

SEQ ID NO: 74494 - DNA, 120 bp, Homo sapiens
  misc_feature: 660 for SV(C|O) and mtDNA
gcgtcagcgaagggttgtagtagcccgtaggggcctacaacgttggggcctttgcgtagttgtatatagcctagaatttttcgttcggtaagcattaggaatgccattgcgattagaatg

SEQ ID NO: 74495 - DNA, 120 bp, Homo sapiens; identical to SEQ ID NO: 60301
  misc_feature: 660 for SV(C|O) and mtDNA

SEQ ID NO: 74496 - DNA, 120 bp, Homo sapiens; identical to SEQ ID NO: 57788
  misc_feature: 660 for SV(C|O) and mtDNA

SEQ ID NO: 74497 - DNA, 120 bp, Homo sapiens
  misc_feature: 660 for SV(C|O) and mtDNA
gatttggaggatcaggcaggcgccaaggagtgagccgaagtttcatcatgcggagatgttggatggggtggggaggtcgatgaatgagtggttaattaattttattagggggttaatttt

SEQ ID NO: 74498 - DNA, 120 bp, Homo sapiens
  misc_feature: 660 for SV(C|O) and mtDNA
ctgaaccgaattggtatatagtttaaacaaaacgaatgatttcgactcattaaattatgataatcatatttaccaaatgcccctcatttacataaatattatactagcatttaccatctc

SEQ ID NO: 74499 - DNA, 120 bp, Homo sapiens
  misc_feature: 660 for SV(C|O) and mtDNA
gagaatagtttaaattagaatcttagctttgggtgctaatggtggagttaaagactttttctctgatttgtccttggaaaaaggttttcatctccggtttacaagactggtgtattagtt

SEQ ID NO: 74500 - DNA, 120 bp, Homo sapiens
  misc_feature: 660 for SV(C|O) and mtDNA
cgggcgaggcctatattacggatcatttctctactcagaaacctgaaacatcggcattatcctcctgcttgcaactatagcaacagccttcataggctatgtcctcccgtgaggccaaat

SEQ ID NO: 74501 - DNA, 120 bp, Homo sapiens
  misc_feature: 660 for SV(C|O) and mtDNA
catgggctacaccttgacctaacgtctttacgtgggtacttgcgcttactttgtagccttcatcagggtttgctgaagatggcggtatataggctgagcaagaggtggtgaggttgatcg

SEQ ID NO: 74502 - DNA, 120 bp, Homo sapiens
  misc_feature: 660 for SV(C|O) and mtDNA
agtattagaggcaccgcctgcccagtgacacatgtttaacggccgcggtaccctaaccgtgcaaaggtagcataatcacttgttccttaaatagggacctgtatgaatggctccacgagg

SEQ ID NO: 74503 - DNA, 120 bp, Homo sapiens; identical to SEQ ID NO: 58193
  misc_feature: 660 for SV(C|O) and mtDNA

SEQ ID NO: 74504 - DNA, 120 bp, Homo sapiens
  misc_feature: 660 for SV(C|O) and mtDNA
caccggcgtcaaagtatttagctgactcgccacactccacggaagcaatatgaaatgatctgctgcagtgctctgagccctaggattcatctttcttttcaccgtaggcggcctgactgg

SEQ ID NO: 74505 - DNA, 120 bp, Homo sapiens
  misc_feature: 660 for SV(C|O) and mtDNA
catcactcgagacgtaaattatggctgaatcatccgctaccttcacgccaatggcgcctcaatattctttatctgcctcttcctacacatcgggcgaggcctatattacggatcatttct

SEQ ID NO: 74506 - DNA, 120 bp, Homo sapiens
  misc_feature: 660 for SV(C|O) and mtDNA
aatataggcctcgcccgatgtgtaggaagaggcagataaagaatattgaggcgccattggcgtgaaggtagcggatgattcagccataatttacgtctcgagtgatgtgggcgattgatg

SEQ ID NO: 74507 - DNA, 120 bp, Homo sapiens
  misc_feature: 660 for SV(C|O) and mtDNA
cacctcatgggctacaccttgacctaacgtctttacgtgggtacttgcgcttactttgtagccttcatcagggtttgctgaagatggcggtatataggctgagcaagaggtggtgaggtt

SEQ ID NO: 74508 - DNA, 120 bp, Homo sapiens
  misc_feature: 660 for SV(C|O) and mtDNA
atttgactgtaatgtgctatgtacggtaaatggctttatgtactatgtgctgttaagggtgagtaggtttgttggtatcctagtgggtgaggggtggctttggagttgcagttgatgtgt

SEQ ID NO: 74509 - DNA, 120 bp, Homo sapiens; identical to SEQ ID NO: 61178
  misc_feature: 660 for SV(C|O) and mtDNA

SEQ ID NO: 74510 - DNA, 120 bp, Homo sapiens; identical to SEQ ID NO: 60932
  misc_feature: 660 for SV(C|O) and mtDNA

SEQ ID NO: 74511 - DNA, 120 bp, Homo sapiens
  misc_feature: 660 for SV(C|O) and mtDNA
attagaggcaccgcctgcccagtgacacatgtttaacggccgcggtaccctaaccgtgcaaaggtagcataatcacttgttccttaaatagggacctgtatgaatggctccacgagggtt

SEQ ID NO: 74512 - DNA, 120 bp, Homo sapiens
  misc_feature: 660 for SV(C|O) and mtDNA
ataggattgcgctgttatccctagggtaacttgttccgttggtcaagttattggatcaattgagtatagtagttcgctttgactggtgaagtcttagcatgtactgctcggaggttgggt

SEQ ID NO: 74513 - DNA, 120 bp, Homo sapiens; identical to SEQ ID NO: 59037
  misc_feature: 660 for SV(C|O) and mtDNA

SEQ ID NO: 74514 - DNA, 120 bp, Homo sapiens
  misc_feature: 660 for SV(C|O) and mtDNA
agaatagtttaaattagaatcttagctttgggtgctaatggtggagttaaagactttttctctgatttgtccttggaaaaaggttttcatctccggtttacaagactggtgtattagttt

SEQ ID NO: 74515 - DNA, 120 bp, Homo sapiens
  misc_feature: 660 for SV(C|O) and mtDNA
actgctaaatccaccttcgacccttaagtttcataagggctatcgtagttttctggggtagaaaatgtagcccatttcttgccacctcatgggctacaccttgacctaacgtctttacgt

SEQ ID NO: 74516 - DNA, 120 bp, Homo sapiens
  misc_feature: 660 for SV(C|O) and mtDNA
aatggcattcctaatgcttaccgaacgaaaaattctaggctatatacaactacgcaaaggccccaacgttgtaggcccctacgggctactacaacccttcgctgacgccataaaactctt

SEQ ID NO: 74517 - DNA, 120 bp, Homo sapiens; identical to SEQ ID NO: 59728
  misc_feature: 659 for SV(C|O) and mtDNA

SEQ ID NO: 74518 - DNA, 120 bp, Homo sapiens; identical to SEQ ID NO: 54165
  misc_feature: 659 for SV(C|O) and mtDNA

SEQ ID NO: 74519 - DNA, 120 bp, Homo sapiens
  misc_feature: 659 for SV(C|O) and mtDNA
tgttacttttatttggagttgcaccaaaatttttggggcctaagaccaatggatagctgttatcctttaaaagttgagaaagccatgttgttagacatgggggcatgagttagcagttct

SEQ ID NO: 74520 - DNA, 120 bp, Homo sapiens
  misc_feature: 659 for SV(C|O) and mtDNA
atcattaataatcataatggctatagcaataaaactaggaatagccccctttcacttctgggtcccagaggttacccaaggcacccctctgacatccggcctgcttcttctcacatgaca

SEQ ID NO: 74521 - DNA, 120 bp, Homo sapiens; identical to SEQ ID NO: 57479
  misc_feature: 659 for SV(C|O) and mtDNA

SEQ ID NO: 74522 - DNA, 120 bp, Homo sapiens
  misc_feature: 659 for SV(C|O) and mtDNA
gcttatcacctttcatgatcacgccctcataatcattttccttatctgcttcctagtcctgtatgcccttttcctaacactcacaacaaaactaactaatactaacatctcagacgctca

SEQ ID NO: 74523 - DNA, 120 bp, Homo sapiens; identical to SEQ ID NO: 52815
  misc_feature: 659 for SV(C|O) and mtDNA

SEQ ID NO: 74524 - DNA, 120 bp, Homo sapiens
  misc_feature: 659 for SV(C|O) and mtDNA
tcgggtgatgatagccaaggtggggataagtgtggtttcgaagaagatataaaatatgattagttctgtggctgtgaatgttataattaaggagatttgtagggagattagtatagagag

SEQ ID NO: 74525 - DNA, 120 bp, Homo sapiens; identical to SEQ ID NO: 52490
  misc_feature: 659 for SV(C|O) and mtDNA

SEQ ID NO: 74526 - DNA, 120 bp, Homo sapiens
  misc_feature: 659 for SV(C|O) and mtDNA
tattctctacaaaccacaaagacattggaacactatacctattattcggcgcatgagctggagtcctaggcacagctctaagcctccttattcgagccgagctgggccagccaggcaacc

SEQ ID NO: 74527 - DNA, 120 bp, Homo sapiens
  misc_feature: 659 for SV(C|O) and mtDNA
taggattcatctttcttttcaccgtaggcggcctgactggcattgtattagcaaactcatcactagacatcgtactacacgacacgtactacgttgtagctcacttccactatgtcctat

SEQ ID NO: 74528 - DNA, 120 bp, Homo sapiens
  misc_feature: 659 for SV(C|O) and mtDNA
ctaggattcatctttcttttcaccgtaggcggcctgactggcattgtattagcaaactcatcactagacatcgtactacacgacacgtactacgttgtagctcacttccactatgtccta

SEQ ID NO: 74529 - DNA, 120 bp, Homo sapiens
  misc_feature: 659 for SV(C|O) and mtDNA
gtgtagcttaacacaaagcacccaacttacacttaggagatttcaacttaacttgaccgctctgagctaaacctagccccaaacccactccaccttactaccagacaaccttagccaaac

SEQ ID NO: 74530 - DNA, 120 bp, Homo sapiens
  misc_feature: 659 for SV(C|O) and mtDNA
ctattctctacaaaccacaaagacattggaacactatacctattattcggcgcatgagctggagtcctaggcacagctctaagcctccttattcgagccgagctgggccagccaggcaac

SEQ ID NO: 74531 - DNA, 120 bp, Homo sapiens
  misc_feature: 659 for SV(C|O) and mtDNA
gctgacacaaaatagactacgaaagtggctttaacatatctgaacacacaatagctaagacccaaactgggattagataccccactatgcttagccctaaacctcaacagttaaatcaac

SEQ ID NO: 74532 - DNA, 120 bp, Homo sapiens
  misc_feature: 659 for SV(C|O) and mtDNA
aagctgcttcttcgaatttgcaattcaatatgaaaatcacctcggagctggtaaaaagaggcctaacccctgtctttagatttacagtccaatgcttcactcagccattttacctcaccc

SEQ ID NO: 74533 - DNA, 120 bp, Homo sapiens
  misc_feature: 659 for SV(C|O) and mtDNA
gggtaaaatagagacccagtaaaattgtaataagcagtgcttgaattatttggtttcggttgttttctattagactatggtgagctcaggtgattgatactcctgatgcgagtaatacgg

SEQ ID NO: 74534 - DNA, 120 bp, Homo sapiens
  misc_feature: 659 for SV(C|O) and mtDNA
aaactaggcggctatggtataatacgcctcacactcattctcaaccccctgacaaaacacatagcctaccccttccttgtactatccctatgaggcataattataacaagctccatctgc

SEQ ID NO: 74535 - DNA, 120 bp, Homo sapiens
  misc_feature: 659 for SV(C|O) and mtDNA
cttctcgtccccatggatgacccccctcagataggggtcccttgaccaccatcctccgtgaaatcaatatcccgcacaagagtgctactctcctcgctccgggcccataacacttggggg

SEQ ID NO: 74536 - DNA, 120 bp, Homo sapiens
  misc_feature: 659 for SV(C|O) and mtDNA
ctcttcaatcagccacatagccctcgtagtaacagccattctcatccaaaccccctgaagcttcaccggcgcagtcattctcataatcgcccacggacttacatcctcattactattctg

SEQ ID NO: 74537 - DNA, 120 bp, Homo sapiens
  misc_feature: 659 for SV(C|O) and mtDNA
cctatggagctttaatttattaatgcaaacagtacctaacaaacccacaggtcctaaactaccaaacctgcattaaaaatttcggttggggcgacctcggagcagaacccaacctccgag

SEQ ID NO: 74538 - DNA, 120 bp, Homo sapiens; identical to SEQ ID NO: 57250
  misc_feature: 659 for SV(C|O) and mtDNA

SEQ ID NO: 74539 - DNA, 120 bp, Homo sapiens; identical to SEQ ID NO: 58840
  misc_feature: 659 for SV(C|O) and mtDNA

SEQ ID NO: 74540 - DNA, 120 bp, Homo sapiens
  misc_feature: 659 for SV(C|O) and mtDNA
accccttatccccatactagttattatcgaaaccatcagcctactcattcaaccaatagccctggccgtacgcctaaccgctaacattactgcaggccacctactcatgcacctaattgg

SEQ ID NO: 74541 - DNA, 120 bp, Homo sapiens; identical to SEQ ID NO: 57059
  misc_feature: 659 for SV(C|O) and mtDNA

SEQ ID NO: 74542 - DNA, 120 bp, Homo sapiens
  misc_feature: 659 for SV(C|O) and mtDNA
aaaactaggcggctatggtataatacgcctcacactcattctcaaccccctgacaaaacacatagcctaccccttccttgtactatccctatgaggcataattataacaagctccatctg

SEQ ID NO: 74543 - DNA, 120 bp, Homo sapiens; identical to SEQ ID NO: 59366
  misc_feature: 658 for SV(C|O) and mtDNA

SEQ ID NO: 74544 - DNA, 120 bp, Homo sapiens; identical to SEQ ID NO: 53165
  misc_feature: 658 for SV(C|O) and mtDNA

SEQ ID NO: 74545 - DNA, 120 bp, Homo sapiens; identical to SEQ ID NO: 52987
  misc_feature: 658 for SV(C|O) and mtDNA

SEQ ID NO: 74546 - DNA, 120 bp, Homo sapiens; identical to SEQ ID NO: 60959
  misc_feature: 658 for SV(C|O) and mtDNA

SEQ ID NO: 74547 - DNA, 120 bp, Homo sapiens; identical to SEQ ID NO: 56891
  misc_feature: 658 for SV(C|O) and mtDNA

SEQ ID NO: 74548 - DNA, 120 bp, Homo sapiens
  misc_feature: 658 for SV(C|O) and mtDNA
ttactgctaaatccaccttcgacccttaagtttcataagggctatcgtagttttctggggtagaaaatgtagcccatttcttgccacctcatgggctacaccttgacctaacgtctttac

SEQ ID NO: 74549 - DNA, 120 bp, Homo sapiens; identical to SEQ ID NO: 56727
  misc_feature: 658 for SV(C|O) and mtDNA

SEQ ID NO: 74550 - DNA, 120 bp, Homo sapiens
  misc_feature: 658 for SV(C|O) and mtDNA
tgtagcttaacacaaagcacccaacttacacttaggagatttcaacttaacttgaccgctctgagctaaacctagccccaaacccactccaccttactaccagacaaccttagccaaacc

SEQ ID NO: 74551 - DNA, 120 bp, Homo sapiens
  misc_feature: 658 for SV(C|O) and mtDNA
ccacgaccaatgatatgaaaaaccatcgttgtatttcaactacaagaacaccaatgaccccaatacgcaaaattaaccccctaataaaattaattaaccactcattcatcgacctcccca

SEQ ID NO: 74552 - DNA, 120 bp, Homo sapiens; identical to SEQ ID NO: 53373
  misc_feature: 658 for SV(C|O) and mtDNA

SEQ ID NO: 74553 - DNA, 120 bp, Homo sapiens
  misc_feature: 658 for SV(C|O) and mtDNA
aagatgaaaaattataaccaagcataatacagcaaggactaacccctataccttctgcataatgaattaactagaaataactttgcaaggagagccaaagctaagacccccgaaaccaga

SEQ ID NO: 74554 - DNA, 120 bp, Homo sapiens; identical to SEQ ID NO: 59546
  misc_feature: 658 for SV(C|O) and mtDNA

SEQ ID NO: 74555 - DNA, 120 bp, Homo sapiens
  misc_feature: 658 for SV(C|O) and mtDNA
aagtcctaatagtagaagaaccctccataaacctggagtgactatatggatgccccccaccctaccacacattcgaagaacccgtatacataaaatctagacaaaaaaggaaggaatcga

SEQ ID NO: 74556 - DNA, 120 bp, Homo sapiens; identical to SEQ ID NO: 55089
  misc_feature: 658 for SV(C|O) and mtDNA

SEQ ID NO: 74557 - DNA, 120 bp, Homo sapiens; identical to SEQ ID NO: 57927
  misc_feature: 658 for SV(C|O) and mtDNA

SEQ ID NO: 74558 - DNA, 120 bp, Homo sapiens
  misc_feature: 658 for SV(C|O) and mtDNA
tcaccgtaggcggcctgactggcattgtattagcaaactcatcactagacatcgtactacacgacacgtactacgttgtagctcacttccactatgtcctatcaataggagctgtatttg

SEQ ID NO: 74559 - DNA, 120 bp, Homo sapiens
  misc_feature: 658 for SV(C|O) and mtDNA
tcaaagtatttagctgactcgccacactccacggaagcaatatgaaatgatctgctgcagtgctctgagccctaggattcatctttcttttcaccgtaggcggcctgactggcattgtat

SEQ ID NO: 74560 - DNA, 120 bp, Homo sapiens
  misc_feature: 658 for SV(C|O) and mtDNA
ggagggtaaaatagagacccagtaaaattgtaataagcagtgcttgaattatttggtttcggttgttttctattagactatggtgagctcaggtgattgatactcctgatgcgagtaata

SEQ ID NO: 74561 - DNA, 120 bp, Homo sapiens
  misc_feature: 658 for SV(C|O) and mtDNA
gcttgtaagcatggggagggggttttgatgtggattgggtttttatgtactacaggtggtcaagtatttatggtaccgtacaatattcatggtggctggcagtaatgtacgaattacata

SEQ ID NO: 74562 - DNA, 120 bp, Homo sapiens; identical to SEQ ID NO: 59196
  misc_feature: 658 for SV(C|O) and mtDNA

SEQ ID NO: 74563 - DNA, 120 bp, Homo sapiens
  misc_feature: 658 for SV(C|O) and mtDNA
gattagactgaaccgaattggtatatagtttaaacaaaacgaatgatttcgactcattaaattatgataatcatatttaccaaatgcccctcatttacataaatattatactagcattta

SEQ ID NO: 74564 - DNA, 120 bp, Homo sapiens; identical to SEQ ID NO: 53649
  misc_feature: 658 for SV(C|O) and mtDNA

SEQ ID NO: 74565 - DNA, 120 bp, Homo sapiens; identical to SEQ ID NO: 52310
  misc_feature: 658 for SV(C|O) and mtDNA

SEQ ID NO: 74566 - DNA, 120 bp, Homo sapiens; identical to SEQ ID NO: 59588
  misc_feature: 658 for SV(C|O) and mtDNA

SEQ ID NO: 74567 - DNA, 120 bp, Homo sapiens
  misc_feature: 658 for SV(C|O) and mtDNA
gttacttttatttggagttgcaccaaaatttttggggcctaagaccaatggatagctgttatcctttaaaagttgagaaagccatgttgttagacatgggggcatgagttagcagttctt

SEQ ID NO: 74568 - DNA, 120 bp, Homo sapiens
  misc_feature: 658 for SV(C|O) and mtDNA
ccccaccggcgtcaaagtatttagctgactcgccacactccacggaagcaatatgaaatgatctgctgcagtgctctgagccctaggattcatctttcttttcaccgtaggcggcctgac

SEQ ID NO: 74569 - DNA, 120 bp, Homo sapiens
  misc_feature: 658 for SV(C|O) and mtDNA
aggcacaatattggctaagagggagtgggtgttgagggttatgagagtagctataatgaacagtgatagtattattccttctaggcatagtagggaggatatgaggtgtgagcggtatac

SEQ ID NO: 74570 - DNA, 120 bp, Homo sapiens; identical to SEQ ID NO: 58991
  misc_feature: 658 for SV(C|O) and mtDNA

SEQ ID NO: 74571 - DNA, 120 bp, Homo sapiens; identical to SEQ ID NO: 55721
  misc_feature: 658 for SV(C|O) and mtDNA

SEQ ID NO: 74572 - DNA, 120 bp, Homo sapiens; identical to SEQ ID NO: 54261
  misc_feature: 658 for SV(C|O) and mtDNA

SEQ ID NO: 74573 - DNA, 120 bp, Homo sapiens; identical to SEQ ID NO: 53874
  misc_feature: 658 for SV(C|O) and mtDNA

SEQ ID NO: 74574 - DNA, 120 bp, Homo sapiens
  misc_feature: 658 for SV(C|O) and mtDNA
ggggtatctaatcccagtttgggtcttagctattgtgtgttcagatatgttaaagccactttcgtagtctattttgtgtcagctggagttttttacaactcaggtgagttttagctttat

SEQ ID NO: 74575 - DNA, 120 bp, Homo sapiens
  misc_feature: 658 for SV(C|O) and mtDNA
atagtacataaagccatttaccgtacatagcacattacagtcaaatcccttctcgtccccatggatgacccccctcagataggggtcccttgaccaccatcctccgtgaaatcaatatcc

SEQ ID NO: 74576 - DNA, 120 bp, Homo sapiens
  misc_feature: 658 for SV(C|O) and mtDNA
agtctaatagaaaacaaccgaaaccaaataattcaagcactgcttattacaattttactgggtctctattttaccctcctacaagcctcagagtacttcgagtctcccttcaccatttcc

SEQ ID NO: 74577 - DNA, 120 bp, Homo sapiens
  misc_feature: 658 for SV(C|O) and mtDNA
accggcgtcaaagtatttagctgactcgccacactccacggaagcaatatgaaatgatctgctgcagtgctctgagccctaggattcatctttcttttcaccgtaggcggcctgactggc

SEQ ID NO: 74578 - DNA, 120 bp, Homo sapiens
  misc_feature: 658 for SV(C|O) and mtDNA
caccgtaggcggcctgactggcattgtattagcaaactcatcactagacatcgtactacacgacacgtactacgttgtagctcacttccactatgtcctatcaataggagctgtatttgc

SEQ ID NO: 74579 - DNA, 120 bp, Homo sapiens
  misc_feature: 658 for SV(C|O) and mtDNA
ctccataaaattcttcttagtagctattaccttcttattatttgatctagaaattgccctccttttacccctaccatgagccctacaaacaactaacctaccactaatagttatgtcatc

SEQ ID NO: 74580 - DNA, 120 bp, Homo sapiens
  misc_feature: 658 for SV(C|O) and mtDNA
aggattcatctttcttttcaccgtaggcggcctgactggcattgtattagcaaactcatcactagacatcgtactacacgacacgtactacgttgtagctcacttccactatgtcctatc

SEQ ID NO: 74581 - DNA, 120 bp, Homo sapiens
  misc_feature: 658 for SV(C|O) and mtDNA
cacaaccaccaccccatcatactctttcacccacagcaccaatcctacctccatcgctaaccccactaaaacactcaccaagacctcaacccctgacccccatgcctcaggatactcctc

SEQ ID NO: 74582 - DNA, 120 bp, Homo sapiens
  misc_feature: 658 for SV(C|O) and mtDNA
ccgagcagtacatgctaagacttcaccagtcaaagcgaactactatactcaattgatccaataacttgaccaacggaacaagttaccctagggataacagcgcaatcctattctagagtc

SEQ ID NO: 74583 - DNA, 120 bp, Homo sapiens
  misc_feature: 658 for SV(C|O) and mtDNA
aatcgaacccatccctgagaatccaaaattctccgtgccacctatcacaccccatcctaaagtaaggtcagctaaataagctatcgggcccataccccgaaaatgttggttatacccttc

SEQ ID NO: 74584 - DNA, 120 bp, Homo sapiens
  misc_feature: 658 for SV(C|O) and mtDNA
ccatcatactctttcacccacagcaccaatcctacctccatcgctaaccccactaaaacactcaccaagacctcaacccctgacccccatgcctcaggatactcctcaatagccatcgct

SEQ ID NO: 74585 - DNA, 120 bp, Homo sapiens; identical to SEQ ID NO: 58641
  misc_feature: 658 for SV(C|O) and mtDNA

SEQ ID NO: 74586 - DNA, 120 bp, Homo sapiens
  misc_feature: 658 for SV(C|O) and mtDNA
aaattatggctgaatcatccgctaccttcacgccaatggcgcctcaatattctttatctgcctcttcctacacatcgggcgaggcctatattacggatcatttctctactcagaaacctg

SEQ ID NO: 74587 - DNA, 120 bp, Homo sapiens; identical to SEQ ID NO: 58544
  misc_feature: 658 for SV(C|O) and mtDNA

SEQ ID NO: 74588 - DNA, 120 bp, Homo sapiens; identical to SEQ ID NO: 59056
  misc_feature: 658 for SV(C|O) and mtDNA

SEQ ID NO: 74589 - DNA, 120 bp, Homo sapiens
  misc_feature: 658 for SV(C|O) and mtDNA
caaagtatttagctgactcgccacactccacggaagcaatatgaaatgatctgctgcagtgctctgagccctaggattcatctttcttttcaccgtaggcggcctgactggcattgtatt

SEQ ID NO: 74590 - DNA, 120 bp, Homo sapiens
  misc_feature: 658 for SV(C|O) and mtDNA
acgtaggcttggattaaggcgacagcgatttctaggatagtcagtagaattagaattgtgaagatgataagtgtagagggaaggttaatggttgatattgctagggtggcgcttccaatt

SEQ ID NO: 74591 - DNA, 120 bp, Homo sapiens; identical to SEQ ID NO: 62987
  misc_feature: 657 for SV(C|O) and mtDNA

SEQ ID NO: 74592 - DNA, 120 bp, Homo sapiens
  misc_feature: 657 for SV(C|O) and mtDNA
tttcgcttcgaagcgaaggcttctcaaatcatgaaaattattaatattactgctgttagagaaatgaatgagcctacagatgataggatgtttcatgtggtgtatgcatcggggtagtcc

SEQ ID NO: 74593 - DNA, 120 bp, Homo sapiens
  misc_feature: 657 for SV(C|O) and mtDNA
attatggctgaatcatccgctaccttcacgccaatggcgcctcaatattctttatctgcctcttcctacacatcgggcgaggcctatattacggatcatttctctactcagaaacctgaa

SEQ ID NO: 74594 - DNA, 120 bp, Homo sapiens; identical to SEQ ID NO: 60154
  misc_feature: 657 for SV(C|O) and mtDNA

SEQ ID NO: 74595 - DNA, 120 bp, Homo sapiens
  misc_feature: 657 for SV(C|O) and mtDNA
ctgacacaaaatagactacgaaagtggctttaacatatctgaacacacaatagctaagacccaaactgggattagataccccactatgcttagccctaaacctcaacagttaaatcaaca

SEQ ID NO: 74596 - DNA, 120 bp, Homo sapiens
  misc_feature: 657 for SV(C|O) and mtDNA
aaccatcgttgtatttcaactacaagaacaccaatgaccccaatacgcaaaattaaccccctaataaaattaattaaccactcattcatcgacctccccaccccatccaacatctccgca

SEQ ID NO: 74597 - DNA, 120 bp, Homo sapiens; identical to SEQ ID NO: 56861
  misc_feature: 657 for SV(C|O) and mtDNA

SEQ ID NO: 74598 - DNA, 120 bp, Homo sapiens; identical to SEQ ID NO: 61237
  misc_feature: 657 for SV(C|O) and mtDNA

SEQ ID NO: 74599 - DNA, 120 bp, Homo sapiens
  misc_feature: 657 for SV(C|O) and mtDNA
tgaaaaattataaccaagcataatacagcaaggactaacccctataccttctgcataatgaattaactagaaataactttgcaaggagagccaaagctaagacccccgaaaccagacgag

SEQ ID NO: 74600 - DNA, 120 bp, Homo sapiens
  misc_feature: 657 for SV(C|O) and mtDNA
tcttttcaccgtaggcggcctgactggcattgtattagcaaactcatcactagacatcgtactacacgacacgtactacgttgtagctcacttccactatgtcctatcaataggagctgt

SEQ ID NO: 74601 - DNA, 120 bp, Homo sapiens
  misc_feature: 657 for SV(C|O) and mtDNA
atcgggtgatgatagccaaggtggggataagtgtggtttcgaagaagatataaaatatgattagttctgtggctgtgaatgttataattaaggagatttgtagggagattagtatagaga

SEQ ID NO: 74602 - DNA, 120 bp, Homo sapiens; identical to SEQ ID NO: 52734
  misc_feature: 657 for SV(C|O) and mtDNA

SEQ ID NO: 74603 - DNA, 120 bp, Homo sapiens; identical to SEQ ID NO: 59660
  misc_feature: 657 for SV(C|O) and mtDNA

SEQ ID NO: 74604 - DNA, 120 bp, Homo sapiens; identical to SEQ ID NO: 56287
  misc_feature: 657 for SV(C|O) and mtDNA

SEQ ID NO: 74605 - DNA, 120 bp, Homo sapiens; identical to SEQ ID NO: 59494
  misc_feature: 657 for SV(C|O) and mtDNA

SEQ ID NO: 74606 - DNA, 120 bp, Homo sapiens
  misc_feature: 657 for SV(C|O) and mtDNA
taggaaaaaaccttgtagagagagtaaaaaatttaacacccatagtaggcctaaaagcagccaccaattaagaaagcgttcaagctcaacacccactacctaaaaaatcccaaacatata

SEQ ID NO: 74607 - DNA, 120 bp, Homo sapiens; identical to SEQ ID NO: 59377
  misc_feature: 657 for SV(C|O) and mtDNA

SEQ ID NO: 74608 - DNA, 120 bp, Homo sapiens
  misc_feature: 657 for SV(C|O) and mtDNA
tactgctaaatccaccttcgacccttaagtttcataagggctatcgtagttttctggggtagaaaatgtagcccatttcttgccacctcatgggctacaccttgacctaacgtctttacg

SEQ ID NO: 74609 - DNA, 120 bp, Homo sapiens
  misc_feature: 657 for SV(C|O) and mtDNA
tacacatcgggcgaggcctatattacggatcatttctctactcagaaacctgaaacatcggcattatcctcctgcttgcaactatagcaacagccttcataggctatgtcctcccgtgag

SEQ ID NO: 74610 - DNA, 120 bp, Homo sapiens; identical to SEQ ID NO: 57108
  misc_feature: 657 for SV(C|O) and mtDNA

SEQ ID NO: 74611 - DNA, 120 bp, Homo sapiens; identical to SEQ ID NO: 58246
  misc_feature: 657 for SV(C|O) and mtDNA

SEQ ID NO: 74612 - DNA, 120 bp, Homo sapiens
  misc_feature: 657 for SV(C|O) and mtDNA
acatcgggcgaggcctatattacggatcatttctctactcagaaacctgaaacatcggcattatcctcctgcttgcaactatagcaacagccttcataggctatgtcctcccgtgaggcc

SEQ ID NO: 74613 - DNA, 120 bp, Homo sapiens
  misc_feature: 657 for SV(C|O) and mtDNA
aaaaaccatcgttgtatttcaactacaagaacaccaatgaccccaatacgcaaaattaaccccctaataaaattaattaaccactcattcatcgacctccccaccccatccaacatctcc

SEQ ID NO: 74614 - DNA, 120 bp, Homo sapiens
  misc_feature: 657 for SV(C|O) and mtDNA
gcgacagcgatttctaggatagtcagtagaattagaattgtgaagatgataagtgtagagggaaggttaatggttgatattgctagggtggcgcttccaattaggtgcatgagtaggtgg

SEQ ID NO: 74615 - DNA, 120 bp, Homo sapiens
  misc_feature: 657 for SV(C|O) and mtDNA
catagtacataaagccatttaccgtacatagcacattacagtcaaatcccttctcgtccccatggatgacccccctcagataggggtcccttgaccaccatcctccgtgaaatcaatatc

SEQ ID NO: 74616 - DNA, 120 bp, Homo sapiens; identical to SEQ ID NO: 61724
  misc_feature: 657 for SV(C|O) and mtDNA

SEQ ID NO: 74617 - DNA, 120 bp, Homo sapiens
  misc_feature: 657 for SV(C|O) and mtDNA
atcactcgagacgtaaattatggctgaatcatccgctaccttcacgccaatggcgcctcaatattctttatctgcctcttcctacacatcgggcgaggcctatattacggatcatttctc

SEQ ID NO: 74618 - DNA, 120 bp, Homo sapiens
  misc_feature: 657 for SV(C|O) and mtDNA
gacatcccgatggtgcagccgctattaaaggttcgtttgttcaacgattaaagtcctacgtgatctgagttcagaccggagtaatccaggtcggtttctatctacttcaaattcctccct

SEQ ID NO: 74619 - DNA, 120 bp, Homo sapiens
  misc_feature: 657 for SV(C|O) and mtDNA
gaatagtgtaaggagtatgggggtaattatggtgggccatacggtagtatttagttggggcatttcactgtaaagaggtgttggttctcttaatctttaacttaaaaggttaatgctaag

SEQ ID NO: 74620 - DNA, 120 bp, Homo sapiens
  misc_feature: 657 for SV(C|O) and mtDNA
gaagagtatgcaatgagcgattttaggtctgtttgtcgtaggcagatggagcttgttataattatgcctcatagggatagtacaaggaaggggtaggctatgtgttttgtcagggggttg

SEQ ID NO: 74621 - DNA, 120 bp, Homo sapiens; identical to SEQ ID NO: 56451
  misc_feature: 657 for SV(C|O) and mtDNA

SEQ ID NO: 74622 - DNA, 120 bp, Homo sapiens
  misc_feature: 657 for SV(C|O) and mtDNA
ctttctccataaaattcttcttagtagctattaccttcttattatttgatctagaaattgccctccttttacccctaccatgagccctacaaacaactaacctaccactaatagttatgt

SEQ ID NO: 74623 - DNA, 120 bp, Homo sapiens; identical to SEQ ID NO: 59990
  misc_feature: 657 for SV(C|O) and mtDNA

SEQ ID NO: 74624 - DNA, 120 bp, Homo sapiens; identical to SEQ ID NO: 59531
  misc_feature: 657 for SV(C|O) and mtDNA

SEQ ID NO: 74625 - DNA, 120 bp, Homo sapiens; identical to SEQ ID NO: 57343
  misc_feature: 657 for SV(C|O) and mtDNA

SEQ ID NO: 74626 - DNA, 120 bp, Homo sapiens
  misc_feature: 657 for SV(C|O) and mtDNA
ccatactccttacactattcctcatcacccaactaaaaatattaaacacaaactaccacctacctccctcaccaaagcccataaaaataaaaaattataacaaaccctgagaaccaaaat

SEQ ID NO: 74627 - DNA, 120 bp, Homo sapiens
  misc_feature: 657 for SV(C|O) and mtDNA
ccaccggcgtcaaagtatttagctgactcgccacactccacggaagcaatatgaaatgatctgctgcagtgctctgagccctaggattcatctttcttttcaccgtaggcggcctgactg

SEQ ID NO: 74628 - DNA, 120 bp, Homo sapiens
  misc_feature: 657 for SV(C|O) and mtDNA
acctctagcatcaccagtattagaggcaccgcctgcccagtgacacatgtttaacggccgcggtaccctaaccgtgcaaaggtagcataatcacttgttccttaaatagggacctgtatg

SEQ ID NO: 74629 - DNA, 120 bp, Homo sapiens
  misc_feature: 657 for SV(C|O) and mtDNA
agggatttgactgtaatgtgctatgtacggtaaatggctttatgtactatgtgctgttaagggtgagtaggtttgttggtatcctagtgggtgaggggtggctttggagttgcagttgat

SEQ ID NO: 74630 - DNA, 120 bp, Homo sapiens; identical to SEQ ID NO: 56854
  misc_feature: 657 for SV(C|O) and mtDNA

SEQ ID NO: 74631 - DNA, 120 bp, Homo sapiens; identical to SEQ ID NO: 53316
  misc_feature: 656 for SV(C|O) and mtDNA

SEQ ID NO: 74632 - DNA, 120 bp, Homo sapiens
  misc_feature: 656 for SV(C|O) and mtDNA
tttggtgcaactccaaataaaagtaacaaccatgcacactactataaccaccctaaccctgacttccctaattccccccatccttaccaccctcgttaaccctaacaaaaaaaactcata

SEQ ID NO: 74633 - DNA, 120 bp, Homo sapiens
  misc_feature: 656 for SV(C|O) and mtDNA
tataggcctcgcccgatgtgtaggaagaggcagataaagaatattgaggcgccattggcgtgaaggtagcggatgattcagccataatttacgtctcgagtgatgtgggcgattgatgaa

SEQ ID NO: 74634 - DNA, 120 bp, Homo sapiens
  misc_feature: 656 for SV(C|O) and mtDNA
ttagtaggcctagtatgaggagcgttatggagtggaagtgaaatcacatggctaggccggaggtcattaggagggctgagagggcccctgttaggggtcatgggctgggttttactatat

SEQ ID NO: 74635 - DNA, 120 bp, Homo sapiens; identical to SEQ ID NO: 59276
  misc_feature: 656 for SV(C|O) and mtDNA

SEQ ID NO: 74636 - DNA, 120 bp, Homo sapiens
  misc_feature: 656 for SV(C|O) and mtDNA
ttaagtattgcaacttactgagggctttgaaggctcttggtctgtatttaacctaaatttctataagattattagtataaaaggggagataggtaggagtagcgtggtaagggcgatgag

SEQ ID NO: 74637 - DNA, 120 bp, Homo sapiens
  misc_feature: 656 for SV(C|O) and mtDNA
tgttggttagtaggcctagtatgaggagcgttatggagtggaagtgaaatcacatggctaggccggaggtcattaggagggctgagagggcccctgttaggggtcatgggctgggtttta

SEQ ID NO: 74638 - DNA, 120 bp, Homo sapiens
  misc_feature: 656 for SV(C|O) and mtDNA
aatagatatagtaccgcaagggaaagatgaaaaattataaccaagcataatacagcaaggactaacccctataccttctgcataatgaattaactagaaataactttgcaaggagagcca

SEQ ID NO: 74639 - DNA, 120 bp, Homo sapiens
  misc_feature: 656 for SV(C|O) and mtDNA
tgcctattgccatactagtctttgccgcctgcgaagcagcggtgggcctagccctactagtctcaatctccaacacatatggcctagactacgtacataacctaaacctactccaatgct

SEQ ID NO: 74640 - DNA, 120 bp, Homo sapiens
  misc_feature: 656 for SV(C|O) and mtDNA
tcttcttactcatccgcttccaccccctagcagaaaatagcccactaatccaaactctaacactatgcttaggcgctatcaccactctgttcgcagcagtctgcgcccttacacaaaatg

SEQ ID NO: 74641 - DNA, 120 bp, Homo sapiens
  misc_feature: 656 for SV(C|O) and mtDNA
tcggaaatggtgaagggagactcgaagtactctgaggcttgtaggagggtaaaatagagacccagtaaaattgtaataagcagtgcttgaattatttggtttcggttgttttctattaga

SEQ ID NO: 74642 - DNA, 120 bp, Homo sapiens; identical to SEQ ID NO: 59046
  misc_feature: 656 for SV(C|O) and mtDNA

SEQ ID NO: 74643 - DNA, 120 bp, Homo sapiens; identical to SEQ ID NO: 53850
  misc_feature: 656 for SV(C|O) and mtDNA

SEQ ID NO: 74644 - DNA, 120 bp, Homo sapiens
  misc_feature: 656 for SV(C|O) and mtDNA
atataggcctcgcccgatgtgtaggaagaggcagataaagaatattgaggcgccattggcgtgaaggtagcggatgattcagccataatttacgtctcgagtgatgtgggcgattgatga

SEQ ID NO: 74645 - DNA, 120 bp, Homo sapiens
  misc_feature: 656 for SV(C|O) and mtDNA
gggcgaggcctatattacggatcatttctctactcagaaacctgaaacatcggcattatcctcctgcttgcaactatagcaacagccttcataggctatgtcctcccgtgaggccaaata

SEQ ID NO: 74646 - DNA, 120 bp, Homo sapiens; identical to SEQ ID NO: 61525
  misc_feature: 656 for SV(C|O) and mtDNA

SEQ ID NO: 74647 - DNA, 120 bp, Homo sapiens
  misc_feature: 656 for SV(C|O) and mtDNA
taccctaccatcacacaccgcacaatcccctatctaggccttcttacgagccaaaacctgcccctactcctcctagacctaacctgactagaaaagctattacctaaaacaatttcacag

SEQ ID NO: 74648 - DNA, 120 bp, Homo sapiens
  misc_feature: 656 for SV(C|O) and mtDNA
gtcaaagtatttagctgactcgccacactccacggaagcaatatgaaatgatctgctgcagtgctctgagccctaggattcatctttcttttcaccgtaggcggcctgactggcattgta

SEQ ID NO: 74649 - DNA, 120 bp, Homo sapiens
  misc_feature: 656 for SV(C|O) and mtDNA
taatcctatttattacctcagaagtttttttcttcgcaggatttttctgagccttttaccactccagcctagcccctaccccccaattaggagggcactggcccccaacaggcatcaccc

SEQ ID NO: 74650 - DNA, 120 bp, Homo sapiens; identical to SEQ ID NO: 57934
  misc_feature: 656 for SV(C|O) and mtDNA

SEQ ID NO: 74651 - DNA, 120 bp, Homo sapiens
  misc_feature: 656 for SV(C|O) and mtDNA
taaagccatttaccgtacatagcacattacagtcaaatcccttctcgtccccatggatgacccccctcagataggggtcccttgaccaccatcctccgtgaaatcaatatcccgcacaag

SEQ ID NO: 74652 - DNA, 120 bp, Homo sapiens; identical to SEQ ID NO: 59145
  misc_feature: 656 for SV(C|O) and mtDNA

SEQ ID NO: 74653 - DNA, 120 bp, Homo sapiens; identical to SEQ ID NO: 61858
  misc_feature: 656 for SV(C|O) and mtDNA

SEQ ID NO: 74654 - DNA, 120 bp, Homo sapiens
  misc_feature: 656 for SV(C|O) and mtDNA
ggtggtcaagggacccctatctgaggggggtcatccatggggacgagaagggatttgactgtaatgtgctatgtacggtaaatggctttatgtactatgtgctgttaagggtgagtaggt

SEQ ID NO: 74655 - DNA, 120 bp, Homo sapiens
  misc_feature: 656 for SV(C|O) and mtDNA
ctccacctcaatcacactactccccatatctaacaacgtaaaaataaaatgacagtttgaacatacaaaacccaccccattcctccccacactcatcgcccttaccacgctactcctacc

SEQ ID NO: 74656 - DNA, 120 bp, Homo sapiens
  misc_feature: 656 for SV(C|O) and mtDNA
gggtatctaatcccagtttgggtcttagctattgtgtgttcagatatgttaaagccactttcgtagtctattttgtgtcagctggagttttttacaactcaggtgagttttagctttatt

SEQ ID NO: 74657 - DNA, 120 bp, Homo sapiens
  misc_feature: 656 for SV(C|O) and mtDNA
gctgtgggtggttgtgttgattcaaattatgtgttttttggaaagtcatgtcagtggtagtaatataattgttgggacgattagttttagcattggagtaggtttaggttatgtacgtag

SEQ ID NO: 74658 - DNA, 120 bp, Homo sapiens; identical to SEQ ID NO: 62875
  misc_feature: 656 for SV(C|O) and mtDNA

SEQ ID NO: 74659 - DNA, 120 bp, Homo sapiens
  misc_feature: 656 for SV(C|O) and mtDNA
gatttgactgtaatgtgctatgtacggtaaatggctttatgtactatgtgctgttaagggtgagtaggtttgttggtatcctagtgggtgaggggtggctttggagttgcagttgatgtg

SEQ ID NO: 74660 - DNA, 120 bp, Homo sapiens
  misc_feature: 656 for SV(C|O) and mtDNA
gatgaaaaattataaccaagcataatacagcaaggactaacccctataccttctgcataatgaattaactagaaataactttgcaaggagagccaaagctaagacccccgaaaccagacg

SEQ ID NO: 74661 - DNA, 120 bp, Homo sapiens; identical to SEQ ID NO: 57618
  misc_feature: 656 for SV(C|O) and mtDNA

SEQ ID NO: 74662 - DNA, 120 bp, Homo sapiens
  misc_feature: 656 for SV(C|O) and mtDNA
ctccgagcagtacatgctaagacttcaccagtcaaagcgaactactatactcaattgatccaataacttgaccaacggaacaagttaccctagggataacagcgcaatcctattctagag

SEQ ID NO: 74663 - DNA, 120 bp, Homo sapiens
  misc_feature: 656 for SV(C|O) and mtDNA
ccaccaccccatcatactctttcacccacagcaccaatcctacctccatcgctaaccccactaaaacactcaccaagacctcaacccctgacccccatgcctcaggatactcctcaatag

SEQ ID NO: 74664 - DNA, 120 bp, Homo sapiens
  misc_feature: 656 for SV(C|O) and mtDNA
catactctttcacccacagcaccaatcctacctccatcgctaaccccactaaaacactcaccaagacctcaacccctgacccccatgcctcaggatactcctcaatagccatcgctgtag

SEQ ID NO: 74665 - DNA, 120 bp, Homo sapiens
  misc_feature: 656 for SV(C|O) and mtDNA
acacatcgggcgaggcctatattacggatcatttctctactcagaaacctgaaacatcggcattatcctcctgcttgcaactatagcaacagccttcataggctatgtcctcccgtgagg

SEQ ID NO: 74666 - DNA, 120 bp, Homo sapiens
  misc_feature: 656 for SV(C|O) and mtDNA
aactcctgagccaacaacttaatatgactagcttacacaatagcttttatagtaaagatacctctttacggactccacttatgactccctaaagcccatgtcgaagcccccatcgctggg

SEQ ID NO: 74667 - DNA, 120 bp, Homo sapiens; identical to SEQ ID NO: 55333
  misc_feature: 656 for SV(C|O) and mtDNA

SEQ ID NO: 74668 - DNA, 120 bp, Homo sapiens; identical to SEQ ID NO: 59333
  misc_feature: 656 for SV(C|O) and mtDNA

SEQ ID NO: 74669 - DNA, 120 bp, Homo sapiens
  misc_feature: 656 for SV(C|O) and mtDNA
atagtgtaaggagtatgggggtaattatggtgggccatacggtagtatttagttggggcatttcactgtaaagaggtgttggttctcttaatctttaacttaaaaggttaatgctaagtt

SEQ ID NO: 74670 - DNA, 120 bp, Homo sapiens; identical to SEQ ID NO: 55636
  misc_feature: 656 for SV(C|O) and mtDNA

SEQ ID NO: 74671 - DNA, 120 bp, Homo sapiens
  misc_feature: 656 for SV(C|O) and mtDNA
agccggttagcgggggcaggcctcctagggagaggagggtggatggaattaagggtgttagtcatgttagcttgtttcaggtgcgagatagtagtagggtcgtggtgctggagtttaagt

SEQ ID NO: 74672 - DNA, 120 bp, Homo sapiens
  misc_feature: 656 for SV(C|O) and mtDNA
actgaaccgaattggtatatagtttaaacaaaacgaatgatttcgactcattaaattatgataatcatatttaccaaatgcccctcatttacataaatattatactagcatttaccatct

SEQ ID NO: 74673 - DNA, 120 bp, Homo sapiens
  misc_feature: 656 for SV(C|O) and mtDNA
aatccccatcctccatatatccaaacaacaaagcataatatttcgcccactaagccaatcactttattgactcctagccgcagacctcctcattctaacctgaatcggaggacaaccagt

SEQ ID NO: 74674 - DNA, 120 bp, Homo sapiens
  misc_feature: 655 for SV(C|O) and mtDNA
tttggacaggtggtgtgtggtggccttggtatgtgctttctcgtgttacatcgcgccatcattggtatatggttagtgtgttggttagtaggcctagtatgaggagcgttatggagtgga

SEQ ID NO: 74675 - DNA, 120 bp, Homo sapiens
  misc_feature: 655 for SV(C|O) and mtDNA
tttctcaacttttaaaggataacagctatccattggtcttaggccccaaaaattttggtgcaactccaaataaaagtaacaaccatgcacactactataaccaccctaaccctgacttcc

SEQ ID NO: 74676 - DNA, 120 bp, Homo sapiens
  misc_feature: 655 for SV(C|O) and mtDNA
agggaaagatgaaaaattataaccaagcataatacagcaaggactaacccctataccttctgcataatgaattaactagaaataactttgcaaggagagccaaagctaagacccccgaaa

SEQ ID NO: 74677 - DNA, 120 bp, Homo sapiens
  misc_feature: 655 for SV(C|O) and mtDNA
ttctcaacttttaaaggataacagctatccattggtcttaggccccaaaaattttggtgcaactccaaataaaagtaacaaccatgcacactactataaccaccctaaccctgacttccc

SEQ ID NO: 74678 - DNA, 120 bp, Homo sapiens; identical to SEQ ID NO: 56430
  misc_feature: 655 for SV(C|O) and mtDNA

SEQ ID NO: 74679 - DNA, 120 bp, Homo sapiens; identical to SEQ ID NO: 56216
  misc_feature: 655 for SV(C|O) and mtDNA

SEQ ID NO: 74680 - DNA, 120 bp, Homo sapiens; identical to SEQ ID NO: 59481
  misc_feature: 655 for SV(C|O) and mtDNA

SEQ ID NO: 74681 - DNA, 120 bp, Homo sapiens
  misc_feature: 655 for SV(C|O) and mtDNA
tagactgaaccgaattggtatatagtttaaacaaaacgaatgatttcgactcattaaattatgataatcatatttaccaaatgcccctcatttacataaatattatactagcatttacca

SEQ ID NO: 74682 - DNA, 120 bp, Homo sapiens
  misc_feature: 655 for SV(C|O) and mtDNA
tcaccagtattagaggcaccgcctgcccagtgacacatgtttaacggccgcggtaccctaaccgtgcaaaggtagcataatcacttgttccttaaatagggacctgtatgaatggctcca

SEQ ID NO: 74683 - DNA, 120 bp, Homo sapiens
  misc_feature: 655 for SV(C|O) and mtDNA
gccctactagtctcaatctccaacacatatggcctagactacgtacataacctaaacctactccaatgctaaaactaatcgtcccaacaattatattactaccactgacatgactttcca

SEQ ID NO: 74684 - DNA, 120 bp, Homo sapiens; identical to SEQ ID NO: 54812
  misc_feature: 655 for SV(C|O) and mtDNA

SEQ ID NO: 74685 - DNA, 120 bp, Homo sapiens; identical to SEQ ID NO: 56695
  misc_feature: 655 for SV(C|O) and mtDNA

SEQ ID NO: 74686 - DNA, 120 bp, Homo sapiens
  misc_feature: 655 for SV(C|O) and mtDNA
tgaagagtatgcaatgagcgattttaggtctgtttgtcgtaggcagatggagcttgttataattatgcctcatagggatagtacaaggaaggggtaggctatgtgttttgtcagggggtt

SEQ ID NO: 74687 - DNA, 120 bp, Homo sapiens; identical to SEQ ID NO: 52680
  misc_feature: 655 for SV(C|O) and mtDNA

SEQ ID NO: 74688 - DNA, 120 bp, Homo sapiens; identical to SEQ ID NO: 62134
  misc_feature: 655 for SV(C|O) and mtDNA

SEQ ID NO: 74689 - DNA, 120 bp, Homo sapiens; identical to SEQ ID NO: 59980
  misc_feature: 655 for SV(C|O) and mtDNA

SEQ ID NO: 74690 - DNA, 120 bp, Homo sapiens
  misc_feature: 655 for SV(C|O) and mtDNA
cactcgagacgtaaattatggctgaatcatccgctaccttcacgccaatggcgcctcaatattctttatctgcctcttcctacacatcgggcgaggcctatattacggatcatttctcta

SEQ ID NO: 74691 - DNA, 120 bp, Homo sapiens
  misc_feature: 655 for SV(C|O) and mtDNA
tacttttatttggagttgcaccaaaatttttggggcctaagaccaatggatagctgttatcctttaaaagttgagaaagccatgttgttagacatgggggcatgagttagcagttcttgt

SEQ ID NO: 74692 - DNA, 120 bp, Homo sapiens
  misc_feature: 655 for SV(C|O) and mtDNA
cagcgaagggttgtagtagcccgtaggggcctacaacgttggggcctttgcgtagttgtatatagcctagaatttttcgttcggtaagcattaggaatgccattgcgattagaatgggta

SEQ ID NO: 74693 - DNA, 120 bp, Homo sapiens
  misc_feature: 655 for SV(C|O) and mtDNA
tacaaccacgaccaatgatatgaaaaaccatcgttgtatttcaactacaagaacaccaatgaccccaatacgcaaaattaaccccctaataaaattaattaaccactcattcatcgacct

SEQ ID NO: 74694 - DNA, 120 bp, Homo sapiens
  misc_feature: 655 for SV(C|O) and mtDNA
ctataaccaccctaaccctgacttccctaattccccccatccttaccaccctcgttaaccctaacaaaaaaaactcatacccccattatgtaaaatccattgtcgcatccacctttatta

SEQ ID NO: 74695 - DNA, 120 bp, Homo sapiens; identical to SEQ ID NO: 61934
  misc_feature: 655 for SV(C|O) and mtDNA

SEQ ID NO: 74696 - DNA, 120 bp, Homo sapiens
  misc_feature: 655 for SV(C|O) and mtDNA
gtgcctattgccatactagtctttgccgcctgcgaagcagcggtgggcctagccctactagtctcaatctccaacacatatggcctagactacgtacataacctaaacctactccaatgc

SEQ ID NO: 74697 - DNA, 120 bp, Homo sapiens
  misc_feature: 655 for SV(C|O) and mtDNA
gtatatattgtaattgagattgctcgggggaataggttatgtgattaggagtagggttaggatgagtgggaagaagaaagagaggaagtaaagtttaattatgcctttttgggttgaggt

SEQ ID NO: 74698 - DNA, 120 bp, Homo sapiens
  misc_feature: 655 for SV(C|O) and mtDNA
aacagctatccattggtcttaggccccaaaaattttggtgcaactccaaataaaagtaacaaccatgcacactactataaccaccctaaccctgacttccctaattccccccatccttac

SEQ ID NO: 74699 - DNA, 120 bp, Homo sapiens
  misc_feature: 655 for SV(C|O) and mtDNA
attagactgaaccgaattggtatatagtttaaacaaaacgaatgatttcgactcattaaattatgataatcatatttaccaaatgcccctcatttacataaatattatactagcatttac

SEQ ID NO: 74700 - DNA, 120 bp, Homo sapiens
  misc_feature: 655 for SV(C|O) and mtDNA
ggaaagatgaaaaattataaccaagcataatacagcaaggactaacccctataccttctgcataatgaattaactagaaataactttgcaaggagagccaaagctaagacccccgaaacc

SEQ ID NO: 74701 - DNA, 120 bp, Homo sapiens
  misc_feature: 655 for SV(C|O) and mtDNA
ggatggatagtaatagggcaaggacgcctcctagtttgttagggacggatcggagaattgtgtaggcgaataggaaatatcattcgggcttgatgtggggaggggtgtttaaggggttgg

SEQ ID NO: 74702 - DNA, 120 bp, Homo sapiens; identical to SEQ ID NO: 60491
  misc_feature: 655 for SV(C|O) and mtDNA

SEQ ID NO: 74703 - DNA, 120 bp, Homo sapiens
  misc_feature: 655 for SV(C|O) and mtDNA
ataaccaccctaaccctgacttccctaattccccccatccttaccaccctcgttaaccctaacaaaaaaaactcatacccccattatgtaaaatccattgtcgcatccacctttattatc

SEQ ID NO: 74704 - DNA, 120 bp, Homo sapiens; identical to SEQ ID NO: 58358
  misc_feature: 655 for SV(C|O) and mtDNA

SEQ ID NO: 74705 - DNA, 120 bp, Homo sapiens; identical to SEQ ID NO: 52467
  misc_feature: 655 for SV(C|O) and mtDNA

SEQ ID NO: 74706 - DNA, 120 bp, Homo sapiens
  misc_feature: 655 for SV(C|O) and mtDNA
acctccgagcagtacatgctaagacttcaccagtcaaagcgaactactatactcaattgatccaataacttgaccaacggaacaagttaccctagggataacagcgcaatcctattctag

SEQ ID NO: 74707 - DNA, 120 bp, Homo sapiens; identical to SEQ ID NO: 55977
  misc_feature: 655 for SV(C|O) and mtDNA

SEQ ID NO: 74708 - DNA, 120 bp, Homo sapiens; identical to SEQ ID NO: 56354
  misc_feature: 655 for SV(C|O) and mtDNA

SEQ ID NO: 74709 - DNA, 120 bp, Homo sapiens
  misc_feature: 655 for SV(C|O) and mtDNA
agtacataaagccatttaccgtacatagcacattacagtcaaatcccttctcgtccccatggatgacccccctcagataggggtcccttgaccaccatcctccgtgaaatcaatatcccg

SEQ ID NO: 74710 - DNA, 120 bp, Homo sapiens; identical to SEQ ID NO: 58788
  misc_feature: 655 for SV(C|O) and mtDNA

SEQ ID NO: 74711 - DNA, 120 bp, Homo sapiens
  misc_feature: 655 for SV(C|O) and mtDNA
atgggctacaccttgacctaacgtctttacgtgggtacttgcgcttactttgtagccttcatcagggtttgctgaagatggcggtatataggctgagcaagaggtggtgaggttgatcgg

SEQ ID NO: 74712 - DNA, 120 bp, Homo sapiens; identical to SEQ ID NO: 57914
  misc_feature: 655 for SV(C|O) and mtDNA

SEQ ID NO: 74713 - DNA, 120 bp, Homo sapiens; identical to SEQ ID NO: 57369
  misc_feature: 655 for SV(C|O) and mtDNA

SEQ ID NO: 74714 - DNA, 120 bp, Homo sapiens; identical to SEQ ID NO: 56135
  misc_feature: 655 for SV(C|O) and mtDNA

SEQ ID NO: 74715 - DNA, 120 bp, Homo sapiens
  misc_feature: 655 for SV(C|O) and mtDNA
acatcccgatggtgcagccgctattaaaggttcgtttgttcaacgattaaagtcctacgtgatctgagttcagaccggagtaatccaggtcggtttctatctacttcaaattcctccctg

SEQ ID NO: 74716 - DNA, 120 bp, Homo sapiens; identical to SEQ ID NO: 62414
  misc_feature: 655 for SV(C|O) and mtDNA

SEQ ID NO: 74717 - DNA, 120 bp, Homo sapiens
  misc_feature: 655 for SV(C|O) and mtDNA
atagtctaatagaaaacaaccgaaaccaaataattcaagcactgcttattacaattttactgggtctctattttaccctcctacaagcctcagagtacttcgagtctcccttcaccattt

SEQ ID NO: 74718 - DNA, 120 bp, Homo sapiens; identical to SEQ ID NO: 52167
  misc_feature: 654 for SV(C|O) and mtDNA

SEQ ID NO: 74719 - DNA, 120 bp, Homo sapiens
  misc_feature: 654 for SV(C|O) and mtDNA
actattctctacaaaccacaaagacattggaacactatacctattattcggcgcatgagctggagtcctaggcacagctctaagcctccttattcgagccgagctgggccagccaggcaa

SEQ ID NO: 74720 - DNA, 120 bp, Homo sapiens; identical to SEQ ID NO: 61982
  misc_feature: 654 for SV(C|O) and mtDNA

SEQ ID NO: 74721 - DNA, 120 bp, Homo sapiens; identical to SEQ ID NO: 60559
  misc_feature: 654 for SV(C|O) and mtDNA

SEQ ID NO: 74722 - DNA, 120 bp, Homo sapiens
  misc_feature: 654 for SV(C|O) and mtDNA
ccttacactattcctcatcacccaactaaaaatattaaacacaaactaccacctacctccctcaccaaagcccataaaaataaaaaattataacaaaccctgagaaccaaaatgaacgaa

SEQ ID NO: 74723 - DNA, 120 bp, Homo sapiens; identical to SEQ ID NO: 56623
  misc_feature: 654 for SV(C|O) and mtDNA

SEQ ID NO: 74724 - DNA, 120 bp, Homo sapiens; identical to SEQ ID NO: 56565
  misc_feature: 654 for SV(C|O) and mtDNA

SEQ ID NO: 74725 - DNA, 120 bp, Homo sapiens
  misc_feature: 654 for SV(C|O) and mtDNA
ttatgcttggttataatttttcatctttcccttgcggtactatatctattgcgccaggtttcaatttctatcgcctatactttatttgggtaaatggtttggctaaggttgtctggtagt

SEQ ID NO: 74726 - DNA, 120 bp, Homo sapiens; identical to SEQ ID NO: 57559
  misc_feature: 654 for SV(C|O) and mtDNA

SEQ ID NO: 74727 - DNA, 120 bp, Homo sapiens
  misc_feature: 654 for SV(C|O) and mtDNA
ccgtaggcggcctgactggcattgtattagcaaactcatcactagacatcgtactacacgacacgtactacgttgtagctcacttccactatgtcctatcaataggagctgtatttgcca

SEQ ID NO: 74728 - DNA, 120 bp, Homo sapiens; identical to SEQ ID NO: 52179
  misc_feature: 654 for SV(C|O) and mtDNA

SEQ ID NO: 74729 - DNA, 120 bp, Homo sapiens; identical to SEQ ID NO: 57229
  misc_feature: 654 for SV(C|O) and mtDNA

SEQ ID NO: 74730 - DNA, 120 bp, Homo sapiens
  misc_feature: 654 for SV(C|O) and mtDNA
ggattcatctttcttttcaccgtaggcggcctgactggcattgtattagcaaactcatcactagacatcgtactacacgacacgtactacgttgtagctcacttccactatgtcctatca

SEQ ID NO: 74731 - DNA, 120 bp, Homo sapiens; identical to SEQ ID NO: 52517
  misc_feature: 654 for SV(C|O) and mtDNA

SEQ ID NO: 74732 - DNA, 120 bp, Homo sapiens
  misc_feature: 654 for SV(C|O) and mtDNA
tctcaacttttaaaggataacagctatccattggtcttaggccccaaaaattttggtgcaactccaaataaaagtaacaaccatgcacactactataaccaccctaaccctgacttccct

SEQ ID NO: 74733 - DNA, 120 bp, Homo sapiens
  misc_feature: 654 for SV(C|O) and mtDNA
cctccgagcagtacatgctaagacttcaccagtcaaagcgaactactatactcaattgatccaataacttgaccaacggaacaagttaccctagggataacagcgcaatcctattctaga

SEQ ID NO: 74734 - DNA, 120 bp, Homo sapiens
  misc_feature: 654 for SV(C|O) and mtDNA
tcgggggaataggttatgtgattaggagtagggttaggatgagtgggaagaagaaagagaggaagtaaagtttaattatgcctttttgggttgaggtgatgatggaggtggagatttggt

SEQ ID NO: 74735 - DNA, 120 bp, Homo sapiens
  misc_feature: 654 for SV(C|O) and mtDNA
ggtaaaatagagacccagtaaaattgtaataagcagtgcttgaattatttggtttcggttgttttctattagactatggtgagctcaggtgattgatactcctgatgcgagtaatacgga

SEQ ID NO: 74736 - DNA, 120 bp, Homo sapiens
  misc_feature: 654 for SV(C|O) and mtDNA
tccaaacaacaatccccctctacctaaaactcacagccctcgctgtcactttcctaggacttctaacagccctagacctcaactacctaaccaacaaacttaaaataaaatccccactat

SEQ ID NO: 74737 - DNA, 120 bp, Homo sapiens
  misc_feature: 654 for SV(C|O) and mtDNA
gtaatataggcctcgcccgatgtgtaggaagaggcagataaagaatattgaggcgccattggcgtgaaggtagcggatgattcagccataatttacgtctcgagtgatgtgggcgattga

SEQ ID NO: 74738 - DNA, 120 bp, Homo sapiens
  misc_feature: 654 for SV(C|O) and mtDNA
tattattatgtcctacaagcattaattaattaacacactttagtaagtatgttcgtctgtaatattgaacgtaggtgcgataaataataggatgaggcaggaatcaaagacagatactgc

SEQ ID NO: 74739 - DNA, 120 bp, Homo sapiens
  misc_feature: 654 for SV(C|O) and mtDNA
gttagtaggcctagtatgaggagcgttatggagtggaagtgaaatcacatggctaggccggaggtcattaggagggctgagagggcccctgttaggggtcatgggctgggttttactata

SEQ ID NO: 74740 - DNA, 120 bp, Homo sapiens; identical to SEQ ID NO: 60985
  misc_feature: 654 for SV(C|O) and mtDNA

SEQ ID NO: 74741 - DNA, 120 bp, Homo sapiens; identical to SEQ ID NO: 55909
  misc_feature: 654 for SV(C|O) and mtDNA

SEQ ID NO: 74742 - DNA, 120 bp, Homo sapiens
  misc_feature: 654 for SV(C|O) and mtDNA
gggaaagatgaaaaattataaccaagcataatacagcaaggactaacccctataccttctgcataatgaattaactagaaataactttgcaaggagagccaaagctaagacccccgaaac

SEQ ID NO: 74743 - DNA, 120 bp, Homo sapiens
  misc_feature: 654 for SV(C|O) and mtDNA
gatatgaaaaaccatcgttgtatttcaactacaagaacaccaatgaccccaatacgcaaaattaaccccctaataaaattaattaaccactcattcatcgacctccccaccccatccaac

SEQ ID NO: 74744 - DNA, 120 bp, Homo sapiens
  misc_feature: 654 for SV(C|O) and mtDNA
gtgcacgcgatagcattgcgagacgctggagccggagcaccctatgtcgcagtatctgtctttgattcctgcctcatcctattatttatcgcacctacgttcaatattacagacgaacat

SEQ ID NO: 74745 - DNA, 120 bp, Homo sapiens
  misc_feature: 654 for SV(C|O) and mtDNA
gtagagagagtaaaaaatttaacacccatagtaggcctaaaagcagccaccaattaagaaagcgttcaagctcaacacccactacctaaaaaatcccaaacatataactgaactcctcac

SEQ ID NO: 74746 - DNA, 120 bp, Homo sapiens; identical to SEQ ID NO: 57784
  misc_feature: 654 for SV(C|O) and mtDNA

SEQ ID NO: 74747 - DNA, 120 bp, Homo sapiens
  misc_feature: 654 for SV(C|O) and mtDNA
caacgcccataatcatacaaagcccccgcaccaataggatcctcccgaatcaaccctgacccctctccttcataaattattcagcttcctacactattaaagtttaccacaaccaccacc

SEQ ID NO: 74748 - DNA, 120 bp, Homo sapiens
  misc_feature: 654 for SV(C|O) and mtDNA
acccccattatgtaaaatccattgtcgcatccacctttattatcagtctcttccccacaacaatattcatgtgcctagaccaagaagttattatctcgaactgacactgagccacaaccc

SEQ ID NO: 74749 - DNA, 120 bp, Homo sapiens
  misc_feature: 654 for SV(C|O) and mtDNA
cctccatatatccaaacaacaaagcataatatttcgcccactaagccaatcactttattgactcctagccgcagacctcctcattctaacctgaatcggaggacaaccagtaagctaccc

SEQ ID NO: 74750 - DNA, 120 bp, Homo sapiens; identical to SEQ ID NO: 56323
  misc_feature: 654 for SV(C|O) and mtDNA

SEQ ID NO: 74751 - DNA, 120 bp, Homo sapiens; identical to SEQ ID NO: 57338
  misc_feature: 654 for SV(C|O) and mtDNA

SEQ ID NO: 74752 - DNA, 120 bp, Homo sapiens; identical to SEQ ID NO: 56744
  misc_feature: 654 for SV(C|O) and mtDNA

SEQ ID NO: 74753 - DNA, 120 bp, Homo sapiens; identical to SEQ ID NO: 57945
  misc_feature: 654 for SV(C|O) and mtDNA

SEQ ID NO: 74754 - DNA, 120 bp, Homo sapiens; identical to SEQ ID NO: 56152
  misc_feature: 654 for SV(C|O) and mtDNA

SEQ ID NO: 74755 - DNA, 120 bp, Homo sapiens; identical to SEQ ID NO: 54933
  misc_feature: 654 for SV(C|O) and mtDNA

SEQ ID NO: 74756 - DNA, 120 bp, Homo sapiens
  misc_feature: 654 for SV(C|O) and mtDNA
gaaaaaccatcgttgtatttcaactacaagaacaccaatgaccccaatacgcaaaattaaccccctaataaaattaattaaccactcattcatcgacctccccaccccatccaacatctc

SEQ ID NO: 74757 - DNA, 120 bp, Homo sapiens
  misc_feature: 654 for SV(C|O) and mtDNA
gagacgtaaattatggctgaatcatccgctaccttcacgccaatggcgcctcaatattctttatctgcctcttcctacacatcgggcgaggcctatattacggatcatttctctactcag

SEQ ID NO: 74758 - DNA, 120 bp, Homo sapiens; identical to SEQ ID NO: 52526
  misc_feature: 654 for SV(C|O) and mtDNA

SEQ ID NO: 74759 - DNA, 120 bp, Homo sapiens; identical to SEQ ID NO: 58394
  misc_feature: 654 for SV(C|O) and mtDNA

SEQ ID NO: 74760 - DNA, 120 bp, Homo sapiens; identical to SEQ ID NO: 57502
  misc_feature: 654 for SV(C|O) and mtDNA

SEQ ID NO: 74761 - DNA, 120 bp, Homo sapiens
  misc_feature: 654 for SV(C|O) and mtDNA
cctaaccgtgcaaaggtagcataatcacttgttccttaaatagggacctgtatgaatggctccacgagggttcagctgtctcttacttttaaccagtgaaattgacctgcccgtgaagag

SEQ ID NO: 74762 - DNA, 120 bp, Homo sapiens
  misc_feature: 654 for SV(C|O) and mtDNA
cctttctccataaaattcttcttagtagctattaccttcttattatttgatctagaaattgccctccttttacccctaccatgagccctacaaacaactaacctaccactaatagttatg

SEQ ID NO: 74763 - DNA, 120 bp, Homo sapiens; identical to SEQ ID NO: 59619
  misc_feature: 654 for SV(C|O) and mtDNA

SEQ ID NO: 74764 - DNA, 120 bp, Homo sapiens
  misc_feature: 654 for SV(C|O) and mtDNA
aaactcctgagccaacaacttaatatgactagcttacacaatagcttttatagtaaagatacctctttacggactccacttatgactccctaaagcccatgtcgaagcccccatcgctgg

SEQ ID NO: 74765 - DNA, 120 bp, Homo sapiens
  misc_feature: 654 for SV(C|O) and mtDNA
ccacctcatgggctacaccttgacctaacgtctttacgtgggtacttgcgcttactttgtagccttcatcagggtttgctgaagatggcggtatataggctgagcaagaggtggtgaggt

SEQ ID NO: 74766 - DNA, 120 bp, Homo sapiens; identical to SEQ ID NO: 61391
  misc_feature: 654 for SV(C|O) and mtDNA

SEQ ID NO: 74767 - DNA, 120 bp, Homo sapiens; identical to SEQ ID NO: 52146
  misc_feature: 654 for SV(C|O) and mtDNA

SEQ ID NO: 74768 - DNA, 120 bp, Homo sapiens
  misc_feature: 654 for SV(C|O) and mtDNA
aacttttaaaggataacagctatccattggtcttaggccccaaaaattttggtgcaactccaaataaaagtaacaaccatgcacactactataaccaccctaaccctgacttccctaatt

SEQ ID NO: 74769 - DNA, 120 bp, Homo sapiens
  misc_feature: 653 for SV(C|O) and mtDNA
tttaaaggataacagctatccattggtcttaggccccaaaaattttggtgcaactccaaataaaagtaacaaccatgcacactactataaccaccctaaccctgacttccctaattcccc

SEQ ID NO: 74770 - DNA, 120 bp, Homo sapiens
  misc_feature: 653 for SV(C|O) and mtDNA
ataaagccatttaccgtacatagcacattacagtcaaatcccttctcgtccccatggatgacccccctcagataggggtcccttgaccaccatcctccgtgaaatcaatatcccgcacaa

SEQ ID NO: 74771 - DNA, 120 bp, Homo sapiens
  misc_feature: 653 for SV(C|O) and mtDNA
ttgtattagcaaactcatcactagacatcgtactacacgacacgtactacgttgtagctcacttccactatgtcctatcaataggagctgtatttgccatcataggaggcttcattcact

SEQ ID NO: 74772 - DNA, 120 bp, Homo sapiens
  misc_feature: 653 for SV(C|O) and mtDNA
ttgtagcaggaatcttcttactcatccgcttccaccccctagcagaaaatagcccactaatccaaactctaacactatgcttaggcgctatcaccactctgttcgcagcagtctgcgccc

SEQ ID NO: 74773 - DNA, 120 bp, Homo sapiens
  misc_feature: 653 for SV(C|O) and mtDNA
tactccttacactattcctcatcacccaactaaaaatattaaacacaaactaccacctacctccctcaccaaagcccataaaaataaaaaattataacaaaccctgagaaccaaaatgaa

SEQ ID NO: 74774 - DNA, 120 bp, Homo sapiens
  misc_feature: 653 for SV(C|O) and mtDNA
ttacttttatttggagttgcaccaaaatttttggggcctaagaccaatggatagctgttatcctttaaaagttgagaaagccatgttgttagacatgggggcatgagttagcagttcttg

SEQ ID NO: 74775 - DNA, 120 bp, Homo sapiens; identical to SEQ ID NO: 53647
  misc_feature: 653 for SV(C|O) and mtDNA

SEQ ID NO: 74776 - DNA, 120 bp, Homo sapiens
  misc_feature: 653 for SV(C|O) and mtDNA
cagtgaatgaagcctcctatgatggcaaatacagctcctattgataggacatagtggaagtgagctacaacgtagtacgtgtcgtgtagtacgatgtctagtgatgagtttgctaataca

SEQ ID NO: 74777 - DNA, 120 bp, Homo sapiens
  misc_feature: 653 for SV(C|O) and mtDNA
tggtggtcaagggacccctatctgaggggggtcatccatggggacgagaagggatttgactgtaatgtgctatgtacggtaaatggctttatgtactatgtgctgttaagggtgagtagg

SEQ ID NO: 74778 - DNA, 120 bp, Homo sapiens; identical to SEQ ID NO: 53082
  misc_feature: 653 for SV(C|O) and mtDNA

SEQ ID NO: 74779 - DNA, 120 bp, Homo sapiens; identical to SEQ ID NO: 53178
  misc_feature: 653 for SV(C|O) and mtDNA

SEQ ID NO: 74780 - DNA, 120 bp, Homo sapiens
  misc_feature: 653 for SV(C|O) and mtDNA
taaccaccctaaccctgacttccctaattccccccatccttaccaccctcgttaaccctaacaaaaaaaactcatacccccattatgtaaaatccattgtcgcatccacctttattatca

SEQ ID NO: 74781 - DNA, 120 bp, Homo sapiens
  misc_feature: 653 for SV(C|O) and mtDNA
tccccaccggcgtcaaagtatttagctgactcgccacactccacggaagcaatatgaaatgatctgctgcagtgctctgagccctaggattcatctttcttttcaccgtaggcggcctga

SEQ ID NO: 74782 - DNA, 120 bp, Homo sapiens; identical to SEQ ID NO: 58825
  misc_feature: 653 for SV(C|O) and mtDNA

SEQ ID NO: 74783 - DNA, 120 bp, Homo sapiens
  misc_feature: 653 for SV(C|O) and mtDNA
tcaacgcccataatcatacaaagcccccgcaccaataggatcctcccgaatcaaccctgacccctctccttcataaattattcagcttcctacactattaaagtttaccacaaccaccac

SEQ ID NO: 74784 - DNA, 120 bp, Homo sapiens
  misc_feature: 653 for SV(C|O) and mtDNA
atcagtgaatgaagcctcctatgatggcaaatacagctcctattgataggacatagtggaagtgagctacaacgtagtacgtgtcgtgtagtacgatgtctagtgatgagtttgctaata

SEQ ID NO: 74785 - DNA, 120 bp, Homo sapiens
  misc_feature: 653 for SV(C|O) and mtDNA
tattagaggcaccgcctgcccagtgacacatgtttaacggccgcggtaccctaaccgtgcaaaggtagcataatcacttgttccttaaatagggacctgtatgaatggctccacgagggt

SEQ ID NO: 74786 - DNA, 120 bp, Homo sapiens
  misc_feature: 653 for SV(C|O) and mtDNA
acacttaggagatttcaacttaacttgaccgctctgagctaaacctagccccaaacccactccaccttactaccagacaaccttagccaaaccatttacccaaataaagtataggcgata

SEQ ID NO: 74787 - DNA, 120 bp, Homo sapiens
  misc_feature: 653 for SV(C|O) and mtDNA
tatccccaccggcgtcaaagtatttagctgactcgccacactccacggaagcaatatgaaatgatctgctgcagtgctctgagccctaggattcatctttcttttcaccgtaggcggcct

SEQ ID NO: 74788 - DNA, 120 bp, Homo sapiens; identical to SEQ ID NO: 59741
  misc_feature: 653 for SV(C|O) and mtDNA

SEQ ID NO: 74789 - DNA, 120 bp, Homo sapiens
  misc_feature: 653 for SV(C|O) and mtDNA
gtgaaaagaaagatgaatcctagggctcagagcactgcagcagatcatttcatattgcttccgtggagtgtggcgagtcagctaaatactttgacgccggtggggatagcgatgattatg

SEQ ID NO: 74790 - DNA, 120 bp, Homo sapiens
  misc_feature: 653 for SV(C|O) and mtDNA
gtaggcggcctgactggcattgtattagcaaactcatcactagacatcgtactacacgacacgtactacgttgtagctcacttccactatgtcctatcaataggagctgtatttgccatc

SEQ ID NO: 74791 - DNA, 120 bp, Homo sapiens; identical to SEQ ID NO: 58420
  misc_feature: 653 for SV(C|O) and mtDNA

SEQ ID NO: 74792 - DNA, 120 bp, Homo sapiens
  misc_feature: 653 for SV(C|O) and mtDNA
cttttaaaggataacagctatccattggtcttaggccccaaaaattttggtgcaactccaaataaaagtaacaaccatgcacactactataaccaccctaaccctgacttccctaattcc

SEQ ID NO: 74793 - DNA, 120 bp, Homo sapiens; identical to SEQ ID NO: 57550
  misc_feature: 653 for SV(C|O) and mtDNA

SEQ ID NO: 74794 - DNA, 120 bp, Homo sapiens; identical to SEQ ID NO: 61659
  misc_feature: 653 for SV(C|O) and mtDNA

SEQ ID NO: 74795 - DNA, 120 bp, Homo sapiens
  misc_feature: 653 for SV(C|O) and mtDNA
atcaaactcctgagccaacaacttaatatgactagcttacacaatagcttttatagtaaagatacctctttacggactccacttatgactccctaaagcccatgtcgaagcccccatcgc

SEQ ID NO: 74796 - DNA, 120 bp, Homo sapiens
  misc_feature: 653 for SV(C|O) and mtDNA
cccatcatactctttcacccacagcaccaatcctacctccatcgctaaccccactaaaacactcaccaagacctcaacccctgacccccatgcctcaggatactcctcaatagccatcgc

SEQ ID NO: 74797 - DNA, 120 bp, Homo sapiens; identical to SEQ ID NO: 56523
  misc_feature: 653 for SV(C|O) and mtDNA

SEQ ID NO: 74798 - DNA, 120 bp, Homo sapiens
  misc_feature: 653 for SV(C|O) and mtDNA
caaaatgccagtatcaggcggcggcttcgaagccaaagtgatgtttggatgtaaagtgaaatattagttggcggatgaagcagatagtgaggaaagttgagccaataatgacgtgaagtc

SEQ ID NO: 74799 - DNA, 120 bp, Homo sapiens; identical to SEQ ID NO: 59293
  misc_feature: 653 for SV(C|O) and mtDNA

SEQ ID NO: 74800 - DNA, 120 bp, Homo sapiens; identical to SEQ ID NO: 58935
  misc_feature: 653 for SV(C|O) and mtDNA

SEQ ID NO: 74801 - DNA, 120 bp, Homo sapiens; identical to SEQ ID NO: 60393
  misc_feature: 653 for SV(C|O) and mtDNA

SEQ ID NO: 74802 - DNA, 120 bp, Homo sapiens; identical to SEQ ID NO: 59100
  misc_feature: 653 for SV(C|O) and mtDNA

SEQ ID NO: 74803 - DNA, 120 bp, Homo sapiens
  misc_feature: 653 for SV(C|O) and mtDNA
accgtgcaaaggtagcataatcacttgttccttaaatagggacctgtatgaatggctccacgagggttcagctgtctcttacttttaaccagtgaaattgacctgcccgtgaagaggcgg

SEQ ID NO: 74804 - DNA, 120 bp, Homo sapiens; identical to SEQ ID NO: 62883
  misc_feature: 653 for SV(C|O) and mtDNA

SEQ ID NO: 74805 - DNA, 120 bp, Homo sapiens
  misc_feature: 653 for SV(C|O) and mtDNA
atccccaccggcgtcaaagtatttagctgactcgccacactccacggaagcaatatgaaatgatctgctgcagtgctctgagccctaggattcatctttcttttcaccgtaggcggcctg

SEQ ID NO: 74806 - DNA, 120 bp, Homo sapiens; identical to SEQ ID NO: 52337
  misc_feature: 653 for SV(C|O) and mtDNA

SEQ ID NO: 74807 - DNA, 120 bp, Homo sapiens
  misc_feature: 653 for SV(C|O) and mtDNA
atttggaggatcaggcaggcgccaaggagtgagccgaagtttcatcatgcggagatgttggatggggtggggaggtcgatgaatgagtggttaattaattttattagggggttaattttg

SEQ ID NO: 74808 - DNA, 120 bp, Homo sapiens
  misc_feature: 653 for SV(C|O) and mtDNA
aggcggcctgactggcattgtattagcaaactcatcactagacatcgtactacacgacacgtactacgttgtagctcacttccactatgtcctatcaataggagctgtatttgccatcat

SEQ ID NO: 74809 - DNA, 120 bp, Homo sapiens
  misc_feature: 653 for SV(C|O) and mtDNA
agagaatagtttaaattagaatcttagctttgggtgctaatggtggagttaaagactttttctctgatttgtccttggaaaaaggttttcatctccggtttacaagactggtgtattagt

SEQ ID NO: 74810 - DNA, 120 bp, Homo sapiens; identical to SEQ ID NO: 53578
  misc_feature: 652 for SV(C|O) and mtDNA

SEQ ID NO: 74811 - DNA, 120 bp, Homo sapiens
  misc_feature: 652 for SV(C|O) and mtDNA
ttttatgtactacaggtggtcaagtatttatggtaccgtacaatattcatggtggctggcagtaatgtacgaattacatagcggttgttgatgggtgagtcaatacttgggtggcaccca

SEQ ID NO: 74812 - DNA, 120 bp, Homo sapiens; identical to SEQ ID NO: 56654
  misc_feature: 652 for SV(C|O) and mtDNA

SEQ ID NO: 74813 - DNA, 120 bp, Homo sapiens; identical to SEQ ID NO: 60720
  misc_feature: 652 for SV(C|O) and mtDNA

SEQ ID NO: 74814 - DNA, 120 bp, Homo sapiens
  misc_feature: 652 for SV(C|O) and mtDNA
tttctccataaaattcttcttagtagctattaccttcttattatttgatctagaaattgccctccttttacccctaccatgagccctacaaacaactaacctaccactaatagttatgtc

SEQ ID NO: 74815 - DNA, 120 bp, Homo sapiens
  misc_feature: 652 for SV(C|O) and mtDNA
cttacactattcctcatcacccaactaaaaatattaaacacaaactaccacctacctccctcaccaaagcccataaaaataaaaaattataacaaaccctgagaaccaaaatgaacgaaa

SEQ ID NO: 74816 - DNA, 120 bp, Homo sapiens; identical to SEQ ID NO: 54106
  misc_feature: 652 for SV(C|O) and mtDNA

SEQ ID NO: 74817 - DNA, 120 bp, Homo sapiens
  misc_feature: 652 for SV(C|O) and mtDNA
aacccaataccaaacgcccctcttcgtctgatccgtcctaatcacagcagtcctacttctcctatctctcccagtcctagctgctggcatcactatactactaacagaccgcaacctcaa

SEQ ID NO: 74818 - DNA, 120 bp, Homo sapiens; identical to SEQ ID NO: 60685
  misc_feature: 652 for SV(C|O) and mtDNA

SEQ ID NO: 74819 - DNA, 120 bp, Homo sapiens; identical to SEQ ID NO: 60232
  misc_feature: 652 for SV(C|O) and mtDNA

SEQ ID NO: 74820 - DNA, 120 bp, Homo sapiens
  misc_feature: 652 for SV(C|O) and mtDNA
tacataaagccatttaccgtacatagcacattacagtcaaatcccttctcgtccccatggatgacccccctcagataggggtcccttgaccaccatcctccgtgaaatcaatatcccgca

SEQ ID NO: 74821 - DNA, 120 bp, Homo sapiens
  misc_feature: 652 for SV(C|O) and mtDNA
tgcatcggggtagtccgagtaacgtcggggcattccggataggccgagaaagtgttgtgggaagaaagttagatttacgccgatgaatatgatagtgaaatggattttggcgtaggtttg

SEQ ID NO: 74822 - DNA, 120 bp, Homo sapiens; identical to SEQ ID NO: 60158
  misc_feature: 652 for SV(C|O) and mtDNA

SEQ ID NO: 74823 - DNA, 120 bp, Homo sapiens
  misc_feature: 652 for SV(C|O) and mtDNA
tcctccatatatccaaacaacaaagcataatatttcgcccactaagccaatcactttattgactcctagccgcagacctcctcattctaacctgaatcggaggacaaccagtaagctacc

SEQ ID NO: 74824 - DNA, 120 bp, Homo sapiens
  misc_feature: 652 for SV(C|O) and mtDNA
tcccttctcgtccccatggatgacccccctcagataggggtcccttgaccaccatcctccgtgaaatcaatatcccgcacaagagtgctactctcctcgctccgggcccataacacttgg

SEQ ID NO: 74825 - DNA, 120 bp, Homo sapiens
  misc_feature: 652 for SV(C|O) and mtDNA
ctaacaggggccctctcagccctcctaatgacctccggcctagccatgtgatttcacttccactccataacgctcctcatactaggcctactaaccaacacactaaccatataccaatga

SEQ ID NO: 74826 - DNA, 120 bp, Homo sapiens; identical to SEQ ID NO: 53519
  misc_feature: 652 for SV(C|O) and mtDNA

SEQ ID NO: 74827 - DNA, 120 bp, Homo sapiens; identical to SEQ ID NO: 61717
  misc_feature: 652 for SV(C|O) and mtDNA

SEQ ID NO: 74828 - DNA, 120 bp, Homo sapiens; identical to SEQ ID NO: 60131
  misc_feature: 652 for SV(C|O) and mtDNA

SEQ ID NO: 74829 - DNA, 120 bp, Homo sapiens
  misc_feature: 652 for SV(C|O) and mtDNA
atccccatcctccatatatccaaacaacaaagcataatatttcgcccactaagccaatcactttattgactcctagccgcagacctcctcattctaacctgaatcggaggacaaccagta

SEQ ID NO: 74830 - DNA, 120 bp, Homo sapiens; identical to SEQ ID NO: 53213
  misc_feature: 652 for SV(C|O) and mtDNA

SEQ ID NO: 74831 - DNA, 120 bp, Homo sapiens
  misc_feature: 652 for SV(C|O) and mtDNA
taattgagattgctcgggggaataggttatgtgattaggagtagggttaggatgagtgggaagaagaaagagaggaagtaaagtttaattatgcctttttgggttgaggtgatgatggag

SEQ ID NO: 74832 - DNA, 120 bp, Homo sapiens
  misc_feature: 652 for SV(C|O) and mtDNA
gttgtagcaggaatcttcttactcatccgcttccaccccctagcagaaaatagcccactaatccaaactctaacactatgcttaggcgctatcaccactctgttcgcagcagtctgcgcc

SEQ ID NO: 74833 - DNA, 120 bp, Homo sapiens; identical to SEQ ID NO: 61902
  misc_feature: 652 for SV(C|O) and mtDNA

SEQ ID NO: 74834 - DNA, 120 bp, Homo sapiens; identical to SEQ ID NO: 57614
  misc_feature: 652 for SV(C|O) and mtDNA

SEQ ID NO: 74835 - DNA, 120 bp, Homo sapiens; identical to SEQ ID NO: 52296
  misc_feature: 652 for SV(C|O) and mtDNA

SEQ ID NO: 74836 - DNA, 120 bp, Homo sapiens
  misc_feature: 652 for SV(C|O) and mtDNA
cccatcctccatatatccaaacaacaaagcataatatttcgcccactaagccaatcactttattgactcctagccgcagacctcctcattctaacctgaatcggaggacaaccagtaagc

SEQ ID NO: 74837 - DNA, 120 bp, Homo sapiens
  misc_feature: 652 for SV(C|O) and mtDNA
caccaccccatcatactctttcacccacagcaccaatcctacctccatcgctaaccccactaaaacactcaccaagacctcaacccctgacccccatgcctcaggatactcctcaatagc

SEQ ID NO: 74838 - DNA, 120 bp, Homo sapiens; identical to SEQ ID NO: 56472
  misc_feature: 652 for SV(C|O) and mtDNA

SEQ ID NO: 74839 - DNA, 120 bp, Homo sapiens
  misc_feature: 652 for SV(C|O) and mtDNA
gcacatagtacataaagccatttaccgtacatagcacattacagtcaaatcccttctcgtccccatggatgacccccctcagataggggtcccttgaccaccatcctccgtgaaatcaat

SEQ ID NO: 74840 - DNA, 120 bp, Homo sapiens; identical to SEQ ID NO: 55709
  misc_feature: 652 for SV(C|O) and mtDNA

SEQ ID NO: 74841 - DNA, 120 bp, Homo sapiens
  misc_feature: 652 for SV(C|O) and mtDNA
gattgagatgggggctagtttttgtcatgtgagaagaagcaggccggatgtcagaggggtgccttgggtaacctctgggacccagaagtgaaagggggctattcctagttttattgctat

SEQ ID NO: 74842 - DNA, 120 bp, Homo sapiens; identical to SEQ ID NO: 58931
  misc_feature: 652 for SV(C|O) and mtDNA

SEQ ID NO: 74843 - DNA, 120 bp, Homo sapiens
  misc_feature: 652 for SV(C|O) and mtDNA
ctcttcctacacatcgggcgaggcctatattacggatcatttctctactcagaaacctgaaacatcggcattatcctcctgcttgcaactatagcaacagccttcataggctatgtcctc

SEQ ID NO: 74844 - DNA, 120 bp, Homo sapiens; identical to SEQ ID NO: 58665
  misc_feature: 652 for SV(C|O) and mtDNA

SEQ ID NO: 74845 - DNA, 120 bp, Homo sapiens; identical to SEQ ID NO: 59890
  misc_feature: 652 for SV(C|O) and mtDNA

SEQ ID NO: 74846 - DNA, 120 bp, Homo sapiens
  misc_feature: 652 for SV(C|O) and mtDNA
aaagatgaaaaattataaccaagcataatacagcaaggactaacccctataccttctgcataatgaattaactagaaataactttgcaaggagagccaaagctaagacccccgaaaccag

SEQ ID NO: 74847 - DNA, 120 bp, Homo sapiens
  misc_feature: 652 for SV(C|O) and mtDNA
ctccatatatccaaacaacaaagcataatatttcgcccactaagccaatcactttattgactcctagccgcagacctcctcattctaacctgaatcggaggacaaccagtaagctaccct

SEQ ID NO: 74848 - DNA, 120 bp, Homo sapiens
  misc_feature: 652 for SV(C|O) and mtDNA
atggtggtcaagggacccctatctgaggggggtcatccatggggacgagaagggatttgactgtaatgtgctatgtacggtaaatggctttatgtactatgtgctgttaagggtgagtag

SEQ ID NO: 74849 - DNA, 120 bp, Homo sapiens
  misc_feature: 652 for SV(C|O) and mtDNA
cgtaggcggcctgactggcattgtattagcaaactcatcactagacatcgtactacacgacacgtactacgttgtagctcacttccactatgtcctatcaataggagctgtatttgccat

SEQ ID NO: 74850 - DNA, 120 bp, Homo sapiens
  misc_feature: 652 for SV(C|O) and mtDNA
cggaggaaaaggttggggaacagctaaataggttgttgttgatttggttaaaaaatagtagagggatgatgctaataattaggctgtgggtggttgtgttgattcaaattatgtgttttt

SEQ ID NO: 74851 - DNA, 120 bp, Homo sapiens
  misc_feature: 652 for SV(C|O) and mtDNA
ccccatcatactctttcacccacagcaccaatcctacctccatcgctaaccccactaaaacactcaccaagacctcaacccctgacccccatgcctcaggatactcctcaatagccatcg

SEQ ID NO: 74852 - DNA, 120 bp, Homo sapiens; identical to SEQ ID NO: 52828
  misc_feature: 652 for SV(C|O) and mtDNA

SEQ ID NO: 74853 - DNA, 120 bp, Homo sapiens
  misc_feature: 652 for SV(C|O) and mtDNA
ccatcctccatatatccaaacaacaaagcataatatttcgcccactaagccaatcactttattgactcctagccgcagacctcctcattctaacctgaatcggaggacaaccagtaagct

SEQ ID NO: 74854 - DNA, 120 bp, Homo sapiens; identical to SEQ ID NO: 55371
  misc_feature: 652 for SV(C|O) and mtDNA

SEQ ID NO: 74855 - DNA, 120 bp, Homo sapiens; identical to SEQ ID NO: 56302
  misc_feature: 652 for SV(C|O) and mtDNA

SEQ ID NO: 74856 - DNA, 120 bp, Homo sapiens
  misc_feature: 652 for SV(C|O) and mtDNA
actcctgagccaacaacttaatatgactagcttacacaatagcttttatagtaaagatacctctttacggactccacttatgactccctaaagcccatgtcgaagcccccatcgctgggt

SEQ ID NO: 74857 - DNA, 120 bp, Homo sapiens; identical to SEQ ID NO: 54136
  misc_feature: 651 for SV(C|O) and mtDNA

SEQ ID NO: 74858 - DNA, 120 bp, Homo sapiens; identical to SEQ ID NO: 52726
  misc_feature: 651 for SV(C|O) and mtDNA

SEQ ID NO: 74859 - DNA, 120 bp, Homo sapiens
  misc_feature: 651 for SV(C|O) and mtDNA
cagccacatagccctcgtagtaacagccattctcatccaaaccccctgaagcttcaccggcgcagtcattctcataatcgcccacggacttacatcctcattactattctgcctagcaaa

SEQ ID NO: 74860 - DNA, 120 bp, Homo sapiens; identical to SEQ ID NO: 54610
  misc_feature: 651 for SV(C|O) and mtDNA

SEQ ID NO: 74861 - DNA, 120 bp, Homo sapiens
  misc_feature: 651 for SV(C|O) and mtDNA
tccctcaaccccgacatcattaccgggttttcctcttgtaaatatagtttaaccaaaacatcagattgtgaatctgacaacagaggcttacgaccccttatttaccgagaaagctcacaa

SEQ ID NO: 74862 - DNA, 120 bp, Homo sapiens
  misc_feature: 651 for SV(C|O) and mtDNA
ttggacaggtggtgtgtggtggccttggtatgtgctttctcgtgttacatcgcgccatcattggtatatggttagtgtgttggttagtaggcctagtatgaggagcgttatggagtggaa

SEQ ID NO: 74863 - DNA, 120 bp, Homo sapiens; identical to SEQ ID NO: 60451
  misc_feature: 651 for SV(C|O) and mtDNA

SEQ ID NO: 74864 - DNA, 120 bp, Homo sapiens; identical to SEQ ID NO: 53559
  misc_feature: 651 for SV(C|O) and mtDNA

SEQ ID NO: 74865 - DNA, 120 bp, Homo sapiens; identical to SEQ ID NO: 61412
  misc_feature: 651 for SV(C|O) and mtDNA

SEQ ID NO: 74866 - DNA, 120 bp, Homo sapiens
  misc_feature: 651 for SV(C|O) and mtDNA
ttattattatgtcctacaagcattaattaattaacacactttagtaagtatgttcgtctgtaatattgaacgtaggtgcgataaataataggatgaggcaggaatcaaagacagatactg

SEQ ID NO: 74867 - DNA, 120 bp, Homo sapiens
  misc_feature: 651 for SV(C|O) and mtDNA
ttatagctactctcataaccctcaacacccactccctcttagccaatattgtgcctattgccatactagtctttgccgcctgcgaagcagcggtgggcctagccctactagtctcaatct

SEQ ID NO: 74868 - DNA, 120 bp, Homo sapiens; identical to SEQ ID NO: 54878
  misc_feature: 651 for SV(C|O) and mtDNA

SEQ ID NO: 74869 - DNA, 120 bp, Homo sapiens
  misc_feature: 651 for SV(C|O) and mtDNA
tgtaggctcattcatttctctaacagcagtaatattaataattttcatgatttgagaagccttcgcttcgaagcgaaaagtcctaatagtagaagaaccctccataaacctggagtgact

SEQ ID NO: 74870 - DNA, 120 bp, Homo sapiens
  misc_feature: 651 for SV(C|O) and mtDNA
atcaacgcccataatcatacaaagcccccgcaccaataggatcctcccgaatcaaccctgacccctctccttcataaattattcagcttcctacactattaaagtttaccacaaccacca

SEQ ID NO: 74871 - DNA, 120 bp, Homo sapiens; identical to SEQ ID NO: 58204
  misc_feature: 651 for SV(C|O) and mtDNA

SEQ ID NO: 74872 - DNA, 120 bp, Homo sapiens; identical to SEQ ID NO: 59230
  misc_feature: 651 for SV(C|O) and mtDNA

SEQ ID NO: 74873 - DNA, 120 bp, Homo sapiens; identical to SEQ ID NO: 55404
  misc_feature: 651 for SV(C|O) and mtDNA

SEQ ID NO: 74874 - DNA, 120 bp, Homo sapiens; identical to SEQ ID NO: 59066
  misc_feature: 651 for SV(C|O) and mtDNA

SEQ ID NO: 74875 - DNA, 120 bp, Homo sapiens; identical to SEQ ID NO: 52443
  misc_feature: 651 for SV(C|O) and mtDNA

SEQ ID NO: 74876 - DNA, 120 bp, Homo sapiens; identical to SEQ ID NO: 56436
  misc_feature: 651 for SV(C|O) and mtDNA

SEQ ID NO: 74877 - DNA, 120 bp, Homo sapiens
  misc_feature: 651 for SV(C|O) and mtDNA
tcatgcggagatgttggatggggtggggaggtcgatgaatgagtggttaattaattttattagggggttaattttgcgtattggggtcattggtgttcttgtagttgaaatacaacgatg

SEQ ID NO: 74878 - DNA, 120 bp, Homo sapiens; identical to SEQ ID NO: 58344
  misc_feature: 651 for SV(C|O) and mtDNA

SEQ ID NO: 74879 - DNA, 120 bp, Homo sapiens
  misc_feature: 651 for SV(C|O) and mtDNA
ctcaacttttaaaggataacagctatccattggtcttaggccccaaaaattttggtgcaactccaaataaaagtaacaaccatgcacactactataaccaccctaaccctgacttcccta

SEQ ID NO: 74880 - DNA, 120 bp, Homo sapiens; identical to SEQ ID NO: 58592
  misc_feature: 651 for SV(C|O) and mtDNA

SEQ ID NO: 74881 - DNA, 120 bp, Homo sapiens
  misc_feature: 651 for SV(C|O) and mtDNA
taaccgtgcaaaggtagcataatcacttgttccttaaatagggacctgtatgaatggctccacgagggttcagctgtctcttacttttaaccagtgaaattgacctgcccgtgaagaggc

SEQ ID NO: 74882 - DNA, 120 bp, Homo sapiens
  misc_feature: 651 for SV(C|O) and mtDNA
taaattatggctgaatcatccgctaccttcacgccaatggcgcctcaatattctttatctgcctcttcctacacatcgggcgaggcctatattacggatcatttctctactcagaaacct

SEQ ID NO: 74883 - DNA, 120 bp, Homo sapiens; identical to SEQ ID NO: 56635
  misc_feature: 651 for SV(C|O) and mtDNA

SEQ ID NO: 74884 - DNA, 120 bp, Homo sapiens; identical to SEQ ID NO: 59497
  misc_feature: 651 for SV(C|O) and mtDNA

SEQ ID NO: 74885 - DNA, 120 bp, Homo sapiens
  misc_feature: 651 for SV(C|O) and mtDNA
gtaggctatgtgttttgtcagggggttgagaatgagtgtgaggcgtattataccatagccgcctagttttaagagtactgcggcaagtactattgacccagcgatgggggcttcgacatg

SEQ ID NO: 74886 - DNA, 120 bp, Homo sapiens
  misc_feature: 651 for SV(C|O) and mtDNA
gtacataaagccatttaccgtacatagcacattacagtcaaatcccttctcgtccccatggatgacccccctcagataggggtcccttgaccaccatcctccgtgaaatcaatatcccgc

SEQ ID NO: 74887 - DNA, 120 bp, Homo sapiens
  misc_feature: 651 for SV(C|O) and mtDNA
ggtatctaatcccagtttgggtcttagctattgtgtgttcagatatgttaaagccactttcgtagtctattttgtgtcagctggagttttttacaactcaggtgagttttagctttattg

SEQ ID NO: 74888 - DNA, 120 bp, Homo sapiens
  misc_feature: 651 for SV(C|O) and mtDNA
accaccccatcatactctttcacccacagcaccaatcctacctccatcgctaaccccactaaaacactcaccaagacctcaacccctgacccccatgcctcaggatactcctcaatagcc

SEQ ID NO: 74889 - DNA, 120 bp, Homo sapiens
  misc_feature: 651 for SV(C|O) and mtDNA
aaaatgccagtatcaggcggcggcttcgaagccaaagtgatgtttggatgtaaagtgaaatattagttggcggatgaagcagatagtgaggaaagttgagccaataatgacgtgaagtcc

SEQ ID NO: 74890 - DNA, 120 bp, Homo sapiens
  misc_feature: 651 for SV(C|O) and mtDNA
atcgaacccatccctgagaatccaaaattctccgtgccacctatcacaccccatcctaaagtaaggtcagctaaataagctatcgggcccataccccgaaaatgttggttatacccttcc

SEQ ID NO: 74891 - DNA, 120 bp, Homo sapiens
  misc_feature: 651 for SV(C|O) and mtDNA
gcatcaccagtattagaggcaccgcctgcccagtgacacatgtttaacggccgcggtaccctaaccgtgcaaaggtagcataatcacttgttccttaaatagggacctgtatgaatggct

SEQ ID NO: 74892 - DNA, 120 bp, Homo sapiens
  misc_feature: 651 for SV(C|O) and mtDNA
gataacagctatccattggtcttaggccccaaaaattttggtgcaactccaaataaaagtaacaaccatgcacactactataaccaccctaaccctgacttccctaattccccccatcct

SEQ ID NO: 74893 - DNA, 120 bp, Homo sapiens
  misc_feature: 651 for SV(C|O) and mtDNA
cttgtaagcatggggagggggttttgatgtggattgggtttttatgtactacaggtggtcaagtatttatggtaccgtacaatattcatggtggctggcagtaatgtacgaattacatag

SEQ ID NO: 74894 - DNA, 120 bp, Homo sapiens; identical to SEQ ID NO: 52313
  misc_feature: 651 for SV(C|O) and mtDNA

SEQ ID NO: 74895 - DNA, 120 bp, Homo sapiens
  misc_feature: 651 for SV(C|O) and mtDNA
cgggtgatgatagccaaggtggggataagtgtggtttcgaagaagatataaaatatgattagttctgtggctgtgaatgttataattaaggagatttgtagggagattagtatagagagg

SEQ ID NO: 74896 - DNA, 120 bp, Homo sapiens
  misc_feature: 651 for SV(C|O) and mtDNA
aaaaccatcgttgtatttcaactacaagaacaccaatgaccccaatacgcaaaattaaccccctaataaaattaattaaccactcattcatcgacctccccaccccatccaacatctccg

SEQ ID NO: 74897 - DNA, 120 bp, Homo sapiens; identical to SEQ ID NO: 53814
  misc_feature: 651 for SV(C|O) and mtDNA

SEQ ID NO: 74898 - DNA, 120 bp, Homo sapiens; identical to SEQ ID NO: 52201
  misc_feature: 651 for SV(C|O) and mtDNA

SEQ ID NO: 74899 - DNA, 120 bp, Homo sapiens; identical to SEQ ID NO: 58791
  misc_feature: 651 for SV(C|O) and mtDNA

SEQ ID NO: 74900 - DNA, 120 bp, Homo sapiens
  misc_feature: 651 for SV(C|O) and mtDNA
aatagtgtaaggagtatgggggtaattatggtgggccatacggtagtatttagttggggcatttcactgtaaagaggtgttggttctcttaatctttaacttaaaaggttaatgctaagt

SEQ ID NO: 74901 - DNA, 120 bp, Homo sapiens; identical to SEQ ID NO: 53409
  misc_feature: 651 for SV(C|O) and mtDNA

SEQ ID NO: 74902 - DNA, 120 bp, Homo sapiens
  misc_feature: 650 for SV(C|O) and mtDNA
ttttcgcttcgaagcgaaggcttctcaaatcatgaaaattattaatattactgctgttagagaaatgaatgagcctacagatgataggatgtttcatgtggtgtatgcatcggggtagtc

SEQ ID NO: 74903 - DNA, 120 bp, Homo sapiens; identical to SEQ ID NO: 62422
  misc_feature: 650 for SV(C|O) and mtDNA

SEQ ID NO: 74904 - DNA, 120 bp, Homo sapiens; identical to SEQ ID NO: 57397
  misc_feature: 650 for SV(C|O) and mtDNA

SEQ ID NO: 74905 - DNA, 120 bp, Homo sapiens
  misc_feature: 650 for SV(C|O) and mtDNA
aagggaaagatgaaaaattataaccaagcataatacagcaaggactaacccctataccttctgcataatgaattaactagaaataactttgcaaggagagccaaagctaagacccccgaa

SEQ ID NO: 74906 - DNA, 120 bp, Homo sapiens
  misc_feature: 650 for SV(C|O) and mtDNA
atatgaaaaaccatcgttgtatttcaactacaagaacaccaatgaccccaatacgcaaaattaaccccctaataaaattaattaaccactcattcatcgacctccccaccccatccaaca

SEQ ID NO: 74907 - DNA, 120 bp, Homo sapiens
  misc_feature: 650 for SV(C|O) and mtDNA
aaaggataacagctatccattggtcttaggccccaaaaattttggtgcaactccaaataaaagtaacaaccatgcacactactataaccaccctaaccctgacttccctaattcccccca

SEQ ID NO: 74908 - DNA, 120 bp, Homo sapiens
  misc_feature: 650 for SV(C|O) and mtDNA
tgggctacaccttgacctaacgtctttacgtgggtacttgcgcttactttgtagccttcatcagggtttgctgaagatggcggtatataggctgagcaagaggtggtgaggttgatcggg

SEQ ID NO: 74909 - DNA, 120 bp, Homo sapiens
  misc_feature: 650 for SV(C|O) and mtDNA
aaacaacaatccccctctacctaaaactcacagccctcgctgtcactttcctaggacttctaacagccctagacctcaactacctaaccaacaaacttaaaataaaatccccactatgca

SEQ ID NO: 74910 - DNA, 120 bp, Homo sapiens; identical to SEQ ID NO: 58853
  misc_feature: 650 for SV(C|O) and mtDNA

SEQ ID NO: 74911 - DNA, 120 bp, Homo sapiens; identical to SEQ ID NO: 60433
  misc_feature: 650 for SV(C|O) and mtDNA

SEQ ID NO: 74912 - DNA, 120 bp, Homo sapiens
  misc_feature: 650 for SV(C|O) and mtDNA
tcatctgtaggctcattcatttctctaacagcagtaatattaataattttcatgatttgagaagccttcgcttcgaagcgaaaagtcctaatagtagaagaaccctccataaacctggag

SEQ ID NO: 74913 - DNA, 120 bp, Homo sapiens; identical to SEQ ID NO: 52941
  misc_feature: 650 for SV(C|O) and mtDNA

SEQ ID NO: 74914 - DNA, 120 bp, Homo sapiens
  misc_feature: 650 for SV(C|O) and mtDNA
cgtaggcttggattaaggcgacagcgatttctaggatagtcagtagaattagaattgtgaagatgataagtgtagagggaaggttaatggttgatattgctagggtggcgcttccaatta

SEQ ID NO: 74915 - DNA, 120 bp, Homo sapiens
  misc_feature: 650 for SV(C|O) and mtDNA
taaaaatgccctagcccacttcttaccacaaggcacacctacaccccttatccccatactagttattatcgaaaccatcagcctactcattcaaccaatagccctggccgtacgcctaac

SEQ ID NO: 74916 - DNA, 120 bp, Homo sapiens
  misc_feature: 650 for SV(C|O) and mtDNA
agccacatagccctcgtagtaacagccattctcatccaaaccccctgaagcttcaccggcgcagtcattctcataatcgcccacggacttacatcctcattactattctgcctagcaaac

SEQ ID NO: 74917 - DNA, 120 bp, Homo sapiens
  misc_feature: 650 for SV(C|O) and mtDNA
acccaataccaaacgcccctcttcgtctgatccgtcctaatcacagcagtcctacttctcctatctctcccagtcctagctgctggcatcactatactactaacagaccgcaacctcaac

SEQ ID NO: 74918 - DNA, 120 bp, Homo sapiens
  misc_feature: 650 for SV(C|O) and mtDNA
gtctaatagaaaacaaccgaaaccaaataattcaagcactgcttattacaattttactgggtctctattttaccctcctacaagcctcagagtacttcgagtctcccttcaccatttccg

SEQ ID NO: 74919 - DNA, 120 bp, Homo sapiens
  misc_feature: 650 for SV(C|O) and mtDNA
gtccctttctccataaaattcttcttagtagctattaccttcttattatttgatctagaaattgccctccttttacccctaccatgagccctacaaacaactaacctaccactaatagtt

SEQ ID NO: 74920 - DNA, 120 bp, Homo sapiens; identical to SEQ ID NO: 60643
  misc_feature: 650 for SV(C|O) and mtDNA

SEQ ID NO: 74921 - DNA, 120 bp, Homo sapiens; identical to SEQ ID NO: 58001
  misc_feature: 650 for SV(C|O) and mtDNA

SEQ ID NO: 74922 - DNA, 120 bp, Homo sapiens; identical to SEQ ID NO: 55623
  misc_feature: 650 for SV(C|O) and mtDNA

SEQ ID NO: 74923 - DNA, 120 bp, Homo sapiens
  misc_feature: 650 for SV(C|O) and mtDNA
aactatctataaacctagccatggccatccccttatgagcgggcgcagtgattataggctttcgctctaagattaaaaatgccctagcccacttcttaccacaaggcacacctacacccc

SEQ ID NO: 74924 - DNA, 120 bp, Homo sapiens
  misc_feature: 650 for SV(C|O) and mtDNA
agccctactagtctcaatctccaacacatatggcctagactacgtacataacctaaacctactccaatgctaaaactaatcgtcccaacaattatattactaccactgacatgactttcc

SEQ ID NO: 74925 - DNA, 120 bp, Homo sapiens
  misc_feature: 650 for SV(C|O) and mtDNA
aaaccatcgttgtatttcaactacaagaacaccaatgaccccaatacgcaaaattaaccccctaataaaattaattaaccactcattcatcgacctccccaccccatccaacatctccgc

SEQ ID NO: 74926 - DNA, 120 bp, Homo sapiens; identical to SEQ ID NO: 58269
  misc_feature: 650 for SV(C|O) and mtDNA

SEQ ID NO: 74927 - DNA, 120 bp, Homo sapiens
  misc_feature: 650 for SV(C|O) and mtDNA
atgaaaaaccatcgttgtatttcaactacaagaacaccaatgaccccaatacgcaaaattaaccccctaataaaattaattaaccactcattcatcgacctccccaccccatccaacatc

SEQ ID NO: 74928 - DNA, 120 bp, Homo sapiens
  misc_feature: 650 for SV(C|O) and mtDNA
atggcattcctaatgcttaccgaacgaaaaattctaggctatatacaactacgcaaaggccccaacgttgtaggcccctacgggctactacaacccttcgctgacgccataaaactcttc

SEQ ID NO: 74929 - DNA, 120 bp, Homo sapiens
  misc_feature: 650 for SV(C|O) and mtDNA
ccctagcaatatcaaccattaaccttccctctacacttatcatcttcacaattctaattctactgactatcctagaaatcgctgtcgccttaatccaagcctacgttttcacacttctag

SEQ ID NO: 74930 - DNA, 120 bp, Homo sapiens
  misc_feature: 650 for SV(C|O) and mtDNA
ccaaacaacaatccccctctacctaaaactcacagccctcgctgtcactttcctaggacttctaacagccctagacctcaactacctaaccaacaaacttaaaataaaatccccactatg

SEQ ID NO: 74931 - DNA, 120 bp, Homo sapiens
  misc_feature: 650 for SV(C|O) and mtDNA
acctcatgggctacaccttgacctaacgtctttacgtgggtacttgcgcttactttgtagccttcatcagggtttgctgaagatggcggtatataggctgagcaagaggtggtgaggttg

SEQ ID NO: 74932 - DNA, 120 bp, Homo sapiens
  misc_feature: 650 for SV(C|O) and mtDNA
acatagtacataaagccatttaccgtacatagcacattacagtcaaatcccttctcgtccccatggatgacccccctcagataggggtcccttgaccaccatcctccgtgaaatcaatat

SEQ ID NO: 74933 - DNA, 120 bp, Homo sapiens
  misc_feature: 650 for SV(C|O) and mtDNA
ataacagctatccattggtcttaggccccaaaaattttggtgcaactccaaataaaagtaacaaccatgcacactactataaccaccctaaccctgacttccctaattccccccatcctt

SEQ ID NO: 74934 - DNA, 120 bp, Homo sapiens; identical to SEQ ID NO: 55138
  misc_feature: 650 for SV(C|O) and mtDNA

SEQ ID NO: 74935 - DNA, 120 bp, Homo sapiens
  misc_feature: 650 for SV(C|O) and mtDNA
agaagggatttgactgtaatgtgctatgtacggtaaatggctttatgtactatgtgctgttaagggtgagtaggtttgttggtatcctagtgggtgaggggtggctttggagttgcagtt

SEQ ID NO: 74936 - DNA, 120 bp, Homo sapiens; identical to SEQ ID NO: 53991
  misc_feature: 650 for SV(C|O) and mtDNA

SEQ ID NO: 74937 - DNA, 120 bp, Homo sapiens; identical to SEQ ID NO: 56459
  misc_feature: 649 for SV(C|O) and mtDNA

SEQ ID NO: 74938 - DNA, 120 bp, Homo sapiens
  misc_feature: 649 for SV(C|O) and mtDNA
ttgtgcctattgccatactagtctttgccgcctgcgaagcagcggtgggcctagccctactagtctcaatctccaacacatatggcctagactacgtacataacctaaacctactccaat

SEQ ID NO: 74939 - DNA, 120 bp, Homo sapiens; identical to SEQ ID NO: 62980
  misc_feature: 649 for SV(C|O) and mtDNA

SEQ ID NO: 74940 - DNA, 120 bp, Homo sapiens
  misc_feature: 649 for SV(C|O) and mtDNA
ttcatcatgcggagatgttggatggggtggggaggtcgatgaatgagtggttaattaattttattagggggttaattttgcgtattggggtcattggtgttcttgtagttgaaatacaac

SEQ ID NO: 74941 - DNA, 120 bp, Homo sapiens
  misc_feature: 649 for SV(C|O) and mtDNA
aggaaaaaaccttgtagagagagtaaaaaatttaacacccatagtaggcctaaaagcagccaccaattaagaaagcgttcaagctcaacacccactacctaaaaaatcccaaacatataa

SEQ ID NO: 74942 - DNA, 120 bp, Homo sapiens; identical to SEQ ID NO: 54917
  misc_feature: 649 for SV(C|O) and mtDNA

SEQ ID NO: 74943 - DNA, 120 bp, Homo sapiens
  misc_feature: 649 for SV(C|O) and mtDNA
tgtgggtggttgtgttgattcaaattatgtgttttttggaaagtcatgtcagtggtagtaatataattgttgggacgattagttttagcattggagtaggtttaggttatgtacgtagtc

SEQ ID NO: 74944 - DNA, 120 bp, Homo sapiens; identical to SEQ ID NO: 55420
  misc_feature: 649 for SV(C|O) and mtDNA

SEQ ID NO: 74945 - DNA, 120 bp, Homo sapiens; identical to SEQ ID NO: 62312
  misc_feature: 649 for SV(C|O) and mtDNA

SEQ ID NO: 74946 - DNA, 120 bp, Homo sapiens
  misc_feature: 649 for SV(C|O) and mtDNA
agacgtaaattatggctgaatcatccgctaccttcacgccaatggcgcctcaatattctttatctgcctcttcctacacatcgggcgaggcctatattacggatcatttctctactcaga

SEQ ID NO: 74947 - DNA, 120 bp, Homo sapiens; identical to SEQ ID NO: 57603
  misc_feature: 649 for SV(C|O) and mtDNA

SEQ ID NO: 74948 - DNA, 120 bp, Homo sapiens
  misc_feature: 649 for SV(C|O) and mtDNA
ggcggcctgactggcattgtattagcaaactcatcactagacatcgtactacacgacacgtactacgttgtagctcacttccactatgtcctatcaataggagctgtatttgccatcata

SEQ ID NO: 74949 - DNA, 120 bp, Homo sapiens
  misc_feature: 649 for SV(C|O) and mtDNA
taggctcattcatttctctaacagcagtaatattaataattttcatgatttgagaagccttcgcttcgaagcgaaaagtcctaatagtagaagaaccctccataaacctggagtgactat

SEQ ID NO: 74950 - DNA, 120 bp, Homo sapiens
  misc_feature: 649 for SV(C|O) and mtDNA
atcccgatggtgcagccgctattaaaggttcgtttgttcaacgattaaagtcctacgtgatctgagttcagaccggagtaatccaggtcggtttctatctacttcaaattcctccctgta

SEQ ID NO: 74951 - DNA, 120 bp, Homo sapiens
  misc_feature: 649 for SV(C|O) and mtDNA
tacacttaggagatttcaacttaacttgaccgctctgagctaaacctagccccaaacccactccaccttactaccagacaaccttagccaaaccatttacccaaataaagtataggcgat

SEQ ID NO: 74952 - DNA, 120 bp, Homo sapiens
  misc_feature: 649 for SV(C|O) and mtDNA
ctaggcctactcaggtaaaaaatcagtgcgagcttagcgctgtgatgagtgtgcctgcaaagatggtagagtagatgacgggttgggccaggggattaattagtacgggaagggtataac

SEQ ID NO: 74953 - DNA, 120 bp, Homo sapiens
  misc_feature: 649 for SV(C|O) and mtDNA
atcctccatatatccaaacaacaaagcataatatttcgcccactaagccaatcactttattgactcctagccgcagacctcctcattctaacctgaatcggaggacaaccagtaagctac

SEQ ID NO: 74954 - DNA, 120 bp, Homo sapiens; identical to SEQ ID NO: 53712
  misc_feature: 649 for SV(C|O) and mtDNA

SEQ ID NO: 74955 - DNA, 120 bp, Homo sapiens; identical to SEQ ID NO: 56913
  misc_feature: 649 for SV(C|O) and mtDNA

SEQ ID NO: 74956 - DNA, 120 bp, Homo sapiens; identical to SEQ ID NO: 52311
  misc_feature: 649 for SV(C|O) and mtDNA

SEQ ID NO: 74957 - DNA, 120 bp, Homo sapiens
  misc_feature: 649 for SV(C|O) and mtDNA
ataatcctatttattacctcagaagtttttttcttcgcaggatttttctgagccttttaccactccagcctagcccctaccccccaattaggagggcactggcccccaacaggcatcacc

SEQ ID NO: 74958 - DNA, 120 bp, Homo sapiens
  misc_feature: 649 for SV(C|O) and mtDNA
caactatctataaacctagccatggccatccccttatgagcgggcgcagtgattataggctttcgctctaagattaaaaatgccctagcccacttcttaccacaaggcacacctacaccc

SEQ ID NO: 74959 - DNA, 120 bp, Homo sapiens
  misc_feature: 649 for SV(C|O) and mtDNA
gggatttgactgtaatgtgctatgtacggtaaatggctttatgtactatgtgctgttaagggtgagtaggtttgttggtatcctagtgggtgaggggtggctttggagttgcagttgatg

SEQ ID NO: 74960 - DNA, 120 bp, Homo sapiens
  misc_feature: 649 for SV(C|O) and mtDNA
accgtaggcggcctgactggcattgtattagcaaactcatcactagacatcgtactacacgacacgtactacgttgtagctcacttccactatgtcctatcaataggagctgtatttgcc

SEQ ID NO: 74961 - DNA, 120 bp, Homo sapiens; identical to SEQ ID NO: 52826
  misc_feature: 649 for SV(C|O) and mtDNA

SEQ ID NO: 74962 - DNA, 120 bp, Homo sapiens
  misc_feature: 649 for SV(C|O) and mtDNA
gattgaagagtatgcaatgagcgattttaggtctgtttgtcgtaggcagatggagcttgttataattatgcctcatagggatagtacaaggaaggggtaggctatgtgttttgtcagggg

SEQ ID NO: 74963 - DNA, 120 bp, Homo sapiens; identical to SEQ ID NO: 60788
  misc_feature: 649 for SV(C|O) and mtDNA

SEQ ID NO: 74964 - DNA, 120 bp, Homo sapiens; identical to SEQ ID NO: 59439
  misc_feature: 649 for SV(C|O) and mtDNA

SEQ ID NO: 74965 - DNA, 120 bp, Homo sapiens
  misc_feature: 649 for SV(C|O) and mtDNA
ccctcaaccccgacatcattaccgggttttcctcttgtaaatatagtttaaccaaaacatcagattgtgaatctgacaacagaggcttacgaccccttatttaccgagaaagctcacaag

SEQ ID NO: 74966 - DNA, 120 bp, Homo sapiens
  misc_feature: 649 for SV(C|O) and mtDNA
ccccatcctccatatatccaaacaacaaagcataatatttcgcccactaagccaatcactttattgactcctagccgcagacctcctcattctaacctgaatcggaggacaaccagtaag

SEQ ID NO: 74967 - DNA, 120 bp, Homo sapiens; identical to SEQ ID NO: 52793
  misc_feature: 649 for SV(C|O) and mtDNA

SEQ ID NO: 74968 - DNA, 120 bp, Homo sapiens
  misc_feature: 649 for SV(C|O) and mtDNA
cctcttcctacacatcgggcgaggcctatattacggatcatttctctactcagaaacctgaaacatcggcattatcctcctgcttgcaactatagcaacagccttcataggctatgtcct

SEQ ID NO: 74969 - DNA, 120 bp, Homo sapiens; identical to SEQ ID NO: 56850
  misc_feature: 649 for SV(C|O) and mtDNA

SEQ ID NO: 74970 - DNA, 120 bp, Homo sapiens
  misc_feature: 649 for SV(C|O) and mtDNA
caacttttaaaggataacagctatccattggtcttaggccccaaaaattttggtgcaactccaaataaaagtaacaaccatgcacactactataaccaccctaaccctgacttccctaat

SEQ ID NO: 74971 - DNA, 120 bp, Homo sapiens
  misc_feature: 649 for SV(C|O) and mtDNA
aatagagacccagtaaaattgtaataagcagtgcttgaattatttggtttcggttgttttctattagactatggtgagctcaggtgattgatactcctgatgcgagtaatacggatgtgt

SEQ ID NO: 74972 - DNA, 120 bp, Homo sapiens; identical to SEQ ID NO: 54406
  misc_feature: 648 for SV(C|O) and mtDNA

SEQ ID NO: 74973 - DNA, 120 bp, Homo sapiens
  misc_feature: 648 for SV(C|O) and mtDNA
tttcatcatgcggagatgttggatggggtggggaggtcgatgaatgagtggttaattaattttattagggggttaattttgcgtattggggtcattggtgttcttgtagttgaaatacaa

SEQ ID NO: 74974 - DNA, 120 bp, Homo sapiens; identical to SEQ ID NO: 55284
  misc_feature: 648 for SV(C|O) and mtDNA

SEQ ID NO: 74975 - DNA, 120 bp, Homo sapiens; identical to SEQ ID NO: 58848
  misc_feature: 648 for SV(C|O) and mtDNA

SEQ ID NO: 74976 - DNA, 120 bp, Homo sapiens; identical to SEQ ID NO: 52239
  misc_feature: 648 for SV(C|O) and mtDNA

SEQ ID NO: 74977 - DNA, 120 bp, Homo sapiens; identical to SEQ ID NO: 62212
  misc_feature: 648 for SV(C|O) and mtDNA

SEQ ID NO: 74978 - DNA, 120 bp, Homo sapiens; identical to SEQ ID NO: 54055
  misc_feature: 648 for SV(C|O) and mtDNA

SEQ ID NO: 74979 - DNA, 120 bp, Homo sapiens
  misc_feature: 648 for SV(C|O) and mtDNA
atccctcaaccccgacatcattaccgggttttcctcttgtaaatatagtttaaccaaaacatcagattgtgaatctgacaacagaggcttacgaccccttatttaccgagaaagctcaca

SEQ ID NO: 74980 - DNA, 120 bp, Homo sapiens; identical to SEQ ID NO: 57563
  misc_feature: 648 for SV(C|O) and mtDNA

SEQ ID NO: 74981 - DNA, 120 bp, Homo sapiens
  misc_feature: 648 for SV(C|O) and mtDNA
taacccaataccaaacgcccctcttcgtctgatccgtcctaatcacagcagtcctacttctcctatctctcccagtcctagctgctggcatcactatactactaacagaccgcaacctca

SEQ ID NO: 74982 - DNA, 120 bp, Homo sapiens
  misc_feature: 648 for SV(C|O) and mtDNA
atcatctgtaggctcattcatttctctaacagcagtaatattaataattttcatgatttgagaagccttcgcttcgaagcgaaaagtcctaatagtagaagaaccctccataaacctgga

SEQ ID NO: 74983 - DNA, 120 bp, Homo sapiens; identical to SEQ ID NO: 60594
  misc_feature: 648 for SV(C|O) and mtDNA

SEQ ID NO: 74984 - DNA, 120 bp, Homo sapiens
  misc_feature: 648 for SV(C|O) and mtDNA
aattatggctgaatcatccgctaccttcacgccaatggcgcctcaatattctttatctgcctcttcctacacatcgggcgaggcctatattacggatcatttctctactcagaaacctga

SEQ ID NO: 74985 - DNA, 120 bp, Homo sapiens; identical to SEQ ID NO: 53851
  misc_feature: 648 for SV(C|O) and mtDNA

SEQ ID NO: 74986 - DNA, 120 bp, Homo sapiens
  misc_feature: 648 for SV(C|O) and mtDNA
attaaaaatgccctagcccacttcttaccacaaggcacacctacaccccttatccccatactagttattatcgaaaccatcagcctactcattcaaccaatagccctggccgtacgccta

SEQ ID NO: 74987 - DNA, 120 bp, Homo sapiens
  misc_feature: 648 for SV(C|O) and mtDNA
catcctccatatatccaaacaacaaagcataatatttcgcccactaagccaatcactttattgactcctagccgcagacctcctcattctaacctgaatcggaggacaaccagtaagcta

SEQ ID NO: 74988 - DNA, 120 bp, Homo sapiens
  misc_feature: 648 for SV(C|O) and mtDNA
tactataaccaccctaaccctgacttccctaattccccccatccttaccaccctcgttaaccctaacaaaaaaaactcatacccccattatgtaaaatccattgtcgcatccacctttat

SEQ ID NO: 74989 - DNA, 120 bp, Homo sapiens
  misc_feature: 648 for SV(C|O) and mtDNA
gtggtcaagggacccctatctgaggggggtcatccatggggacgagaagggatttgactgtaatgtgctatgtacggtaaatggctttatgtactatgtgctgttaagggtgagtaggtt

SEQ ID NO: 74990 - DNA, 120 bp, Homo sapiens; identical to SEQ ID NO: 57936
  misc_feature: 648 for SV(C|O) and mtDNA

SEQ ID NO: 74991 - DNA, 120 bp, Homo sapiens
  misc_feature: 648 for SV(C|O) and mtDNA
ggtaggctatgtgttttgtcagggggttgagaatgagtgtgaggcgtattataccatagccgcctagttttaagagtactgcggcaagtactattgacccagcgatgggggcttcgacat

SEQ ID NO: 74992 - DNA, 120 bp, Homo sapiens; identical to SEQ ID NO: 53769
  misc_feature: 648 for SV(C|O) and mtDNA

SEQ ID NO: 74993 - DNA, 120 bp, Homo sapiens
  misc_feature: 648 for SV(C|O) and mtDNA
gccacatagccctcgtagtaacagccattctcatccaaaccccctgaagcttcaccggcgcagtcattctcataatcgcccacggacttacatcctcattactattctgcctagcaaact

SEQ ID NO: 74994 - DNA, 120 bp, Homo sapiens
  misc_feature: 648 for SV(C|O) and mtDNA
gaaccctccataaacctggagtgactatatggatgccccccaccctaccacacattcgaagaacccgtatacataaaatctagacaaaaaaggaaggaatcgaaccccccaaagctggtt

SEQ ID NO: 74995 - DNA, 120 bp, Homo sapiens
  misc_feature: 648 for SV(C|O) and mtDNA
cttcaaattcctccctgtacgaaaggacaagagaaataaggcctacttcacaaagcgccttcccccgtaaatgatatcatctcaacttagtattatacccacacccacccaagaacaggg

SEQ ID NO: 74996 - DNA, 120 bp, Homo sapiens
  misc_feature: 648 for SV(C|O) and mtDNA
ctcgggggaataggttatgtgattaggagtagggttaggatgagtgggaagaagaaagagaggaagtaaagtttaattatgcctttttgggttgaggtgatgatggaggtggagatttgg

SEQ ID NO: 74997 - DNA, 120 bp, Homo sapiens
  misc_feature: 648 for SV(C|O) and mtDNA
atgtgtaggaagaggcagataaagaatattgaggcgccattggcgtgaaggtagcggatgattcagccataatttacgtctcgagtgatgtgggcgattgatgaaaaggcggttgaggcg

SEQ ID NO: 74998 - DNA, 120 bp, Homo sapiens; identical to SEQ ID NO: 56773
  misc_feature: 648 for SV(C|O) and mtDNA

SEQ ID NO: 74999 - DNA, 120 bp, Homo sapiens; identical to SEQ ID NO: 52874
  misc_feature: 648 for SV(C|O) and mtDNA

SEQ ID NO: 75000 - DNA, 120 bp, Homo sapiens; identical to SEQ ID NO: 59102
  misc_feature: 648 for SV(C|O) and mtDNA

SEQ ID NO: 75001 - DNA, 120 bp, Homo sapiens
  misc_feature: 648 for SV(C|O) and mtDNA
caaactcctgagccaacaacttaatatgactagcttacacaatagcttttatagtaaagatacctctttacggactccacttatgactccctaaagcccatgtcgaagcccccatcgctg

SEQ ID NO: 75002 - DNA, 120 bp, Homo sapiens; identical to SEQ ID NO: 53241
  misc_feature: 648 for SV(C|O) and mtDNA

SEQ ID NO: 75003 - DNA, 120 bp, Homo sapiens
  misc_feature: 648 for SV(C|O) and mtDNA
agccaaccccttaaacacccctccccacatcaagcccgaatgatatttcctattcgcctacacaattctccgatccgtccctaacaaactaggaggcgtccttgccctattactatccat

SEQ ID NO: 75004 - DNA, 120 bp, Homo sapiens
  misc_feature: 648 for SV(C|O) and mtDNA
aggcttggattaaggcgacagcgatttctaggatagtcagtagaattagaattgtgaagatgataagtgtagagggaaggttaatggttgatattgctagggtggcgcttccaattaggt

SEQ ID NO: 75005 - DNA, 120 bp, Homo sapiens
  misc_feature: 648 for SV(C|O) and mtDNA
aatgccagtatcaggcggcggcttcgaagccaaagtgatgtttggatgtaaagtgaaatattagttggcggatgaagcagatagtgaggaaagttgagccaataatgacgtgaagtccgt

SEQ ID NO: 75006 - DNA, 120 bp, Homo sapiens; identical to SEQ ID NO: 54430
  misc_feature: 647 for SV(C|O) and mtDNA

SEQ ID NO: 75007 - DNA, 120 bp, Homo sapiens; identical to SEQ ID NO: 62977
  misc_feature: 647 for SV(C|O) and mtDNA

SEQ ID NO: 75008 - DNA, 120 bp, Homo sapiens; identical to SEQ ID NO: 62974
  misc_feature: 647 for SV(C|O) and mtDNA

SEQ ID NO: 75009 - DNA, 120 bp, Homo sapiens
  misc_feature: 647 for SV(C|O) and mtDNA
attgtgcctattgccatactagtctttgccgcctgcgaagcagcggtgggcctagccctactagtctcaatctccaacacatatggcctagactacgtacataacctaaacctactccaa

SEQ ID NO: 75010 - DNA, 120 bp, Homo sapiens; identical to SEQ ID NO: 58075
  misc_feature: 647 for SV(C|O) and mtDNA

SEQ ID NO: 75011 - DNA, 120 bp, Homo sapiens; identical to SEQ ID NO: 55083
  misc_feature: 647 for SV(C|O) and mtDNA

SEQ ID NO: 75012 - DNA, 120 bp, Homo sapiens
  misc_feature: 647 for SV(C|O) and mtDNA
ttagactgaaccgaattggtatatagtttaaacaaaacgaatgatttcgactcattaaattatgataatcatatttaccaaatgcccctcatttacataaatattatactagcatttacc

SEQ ID NO: 75013 - DNA, 120 bp, Homo sapiens
  misc_feature: 647 for SV(C|O) and mtDNA
ttaaaggataacagctatccattggtcttaggccccaaaaattttggtgcaactccaaataaaagtaacaaccatgcacactactataaccaccctaaccctgacttccctaattccccc

SEQ ID NO: 75014 - DNA, 120 bp, Homo sapiens
  misc_feature: 647 for SV(C|O) and mtDNA
gaaagatgaaaaattataaccaagcataatacagcaaggactaacccctataccttctgcataatgaattaactagaaataactttgcaaggagagccaaagctaagacccccgaaacca

SEQ ID NO: 75015 - DNA, 120 bp, Homo sapiens
  misc_feature: 647 for SV(C|O) and mtDNA
tggttcactggataagtggcgttggcttgccatgattgtgaggggtaggagtcaggtagttagtattaggaggggggttgttagggggtcggaggaaaaggttggggaacagctaaatag

SEQ ID NO: 75016 - DNA, 120 bp, Homo sapiens
  misc_feature: 647 for SV(C|O) and mtDNA
tcctacacatcgggcgaggcctatattacggatcatttctctactcagaaacctgaaacatcggcattatcctcctgcttgcaactatagcaacagccttcataggctatgtcctcccgt

SEQ ID NO: 75017 - DNA, 120 bp, Homo sapiens
  misc_feature: 647 for SV(C|O) and mtDNA
tcagtgaatgaagcctcctatgatggcaaatacagctcctattgataggacatagtggaagtgagctacaacgtagtacgtgtcgtgtagtacgatgtctagtgatgagtttgctaatac

SEQ ID NO: 75018 - DNA, 120 bp, Homo sapiens
  misc_feature: 647 for SV(C|O) and mtDNA
cacatagtacataaagccatttaccgtacatagcacattacagtcaaatcccttctcgtccccatggatgacccccctcagataggggtcccttgaccaccatcctccgtgaaatcaata

SEQ ID NO: 75019 - DNA, 120 bp, Homo sapiens; identical to SEQ ID NO: 60730
  misc_feature: 647 for SV(C|O) and mtDNA

SEQ ID NO: 75020 - DNA, 120 bp, Homo sapiens
  misc_feature: 647 for SV(C|O) and mtDNA
cttaaaataaaatccccactatgcacattttatttctccaacatactcggattctaccctaccatcacacaccgcacaatcccctatctaggccttcttacgagccaaaacctgccccta

SEQ ID NO: 75021 - DNA, 120 bp, Homo sapiens
  misc_feature: 647 for SV(C|O) and mtDNA
accctagcaatatcaaccattaaccttccctctacacttatcatcttcacaattctaattctactgactatcctagaaatcgctgtcgccttaatccaagcctacgttttcacacttcta

SEQ ID NO: 75022 - DNA, 120 bp, Homo sapiens; identical to SEQ ID NO: 54416
  misc_feature: 647 for SV(C|O) and mtDNA

SEQ ID NO: 75023 - DNA, 120 bp, Homo sapiens
  misc_feature: 647 for SV(C|O) and mtDNA
taatataggcctcgcccgatgtgtaggaagaggcagataaagaatattgaggcgccattggcgtgaaggtagcggatgattcagccataatttacgtctcgagtgatgtgggcgattgat

SEQ ID NO: 75024 - DNA, 120 bp, Homo sapiens
  misc_feature: 647 for SV(C|O) and mtDNA
taaccctactcctaatcacataacctattcccccgagcaatctcaattacaatatatacaccaacaaacaatgttcaaccagtaactactactaatcaacgcccataatcatacaaagcc

SEQ ID NO: 75025 - DNA, 120 bp, Homo sapiens; identical to SEQ ID NO: 58480
  misc_feature: 647 for SV(C|O) and mtDNA

SEQ ID NO: 75026 - DNA, 120 bp, Homo sapiens; identical to SEQ ID NO: 62226
  misc_feature: 647 for SV(C|O) and mtDNA

SEQ ID NO: 75027 - DNA, 120 bp, Homo sapiens; identical to SEQ ID NO: 59146
  misc_feature: 647 for SV(C|O) and mtDNA

SEQ ID NO: 75028 - DNA, 120 bp, Homo sapiens
  misc_feature: 647 for SV(C|O) and mtDNA
accccatcatactctttcacccacagcaccaatcctacctccatcgctaaccccactaaaacactcaccaagacctcaacccctgacccccatgcctcaggatactcctcaatagccatc

SEQ ID NO: 75029 - DNA, 120 bp, Homo sapiens
  misc_feature: 647 for SV(C|O) and mtDNA
gatccgtaatataggcctcgcccgatgtgtaggaagaggcagataaagaatattgaggcgccattggcgtgaaggtagcggatgattcagccataatttacgtctcgagtgatgtgggcg

SEQ ID NO: 75030 - DNA, 120 bp, Homo sapiens; identical to SEQ ID NO: 61012
  misc_feature: 647 for SV(C|O) and mtDNA

SEQ ID NO: 75031 - DNA, 120 bp, Homo sapiens; identical to SEQ ID NO: 57251
  misc_feature: 647 for SV(C|O) and mtDNA

SEQ ID NO: 75032 - DNA, 120 bp, Homo sapiens
  misc_feature: 647 for SV(C|O) and mtDNA
ccagctttggggggttcgattccttccttttttgtctagattttatgtatacgggttcttcgaatgtgtggtagggtggggggcatccatatagtcactccaggtttatggagggttctt

SEQ ID NO: 75033 - DNA, 120 bp, Homo sapiens
  misc_feature: 647 for SV(C|O) and mtDNA
aagggacccctatctgaggggggtcatccatggggacgagaagggatttgactgtaatgtgctatgtacggtaaatggctttatgtactatgtgctgttaagggtgagtaggtttgttgg

SEQ ID NO: 75034 - DNA, 120 bp, Homo sapiens
  misc_feature: 647 for SV(C|O) and mtDNA
cattatagctactctcataaccctcaacacccactccctcttagccaatattgtgcctattgccatactagtctttgccgcctgcgaagcagcggtgggcctagccctactagtctcaat

SEQ ID NO: 75035 - DNA, 120 bp, Homo sapiens
  misc_feature: 647 for SV(C|O) and mtDNA
catcccgatggtgcagccgctattaaaggttcgtttgttcaacgattaaagtcctacgtgatctgagttcagaccggagtaatccaggtcggtttctatctacttcaaattcctccctgt

SEQ ID NO: 75036 - DNA, 120 bp, Homo sapiens
  misc_feature: 647 for SV(C|O) and mtDNA
aggagtaggagagagggaggtaagagtcagaagcttatgttgtttatgcggggaaacgccatatcgggggcaccgattattaggggaactagtcagttgccaaagcctccgattatgatg

SEQ ID NO: 75037 - DNA, 120 bp, Homo sapiens
  misc_feature: 647 for SV(C|O) and mtDNA
caccctagcaatatcaaccattaaccttccctctacacttatcatcttcacaattctaattctactgactatcctagaaatcgctgtcgccttaatccaagcctacgttttcacacttct

SEQ ID NO: 75038 - DNA, 120 bp, Homo sapiens; identical to SEQ ID NO: 59039
  misc_feature: 647 for SV(C|O) and mtDNA

SEQ ID NO: 75039 - DNA, 120 bp, Homo sapiens
  misc_feature: 646 for SV(C|O) and mtDNA
tttcttgccacctcatgggctacaccttgacctaacgtctttacgtgggtacttgcgcttactttgtagccttcatcagggtttgctgaagatggcggtatataggctgagcaagaggtg

SEQ ID NO: 75040 - DNA, 120 bp, Homo sapiens
  misc_feature: 646 for SV(C|O) and mtDNA
atagatatagtaccgcaagggaaagatgaaaaattataaccaagcataatacagcaaggactaacccctataccttctgcataatgaattaactagaaataactttgcaaggagagccaa

SEQ ID NO: 75041 - DNA, 120 bp, Homo sapiens
  misc_feature: 646 for SV(C|O) and mtDNA
ttgaagagtatgcaatgagcgattttaggtctgtttgtcgtaggcagatggagcttgttataattatgcctcatagggatagtacaaggaaggggtaggctatgtgttttgtcagggggt

SEQ ID NO: 75042 - DNA, 120 bp, Homo sapiens
  misc_feature: 646 for SV(C|O) and mtDNA
ttctcgtccccatggatgacccccctcagataggggtcccttgaccaccatcctccgtgaaatcaatatcccgcacaagagtgctactctcctcgctccgggcccataacacttgggggt

SEQ ID NO: 75043 - DNA, 120 bp, Homo sapiens
  misc_feature: 646 for SV(C|O) and mtDNA
ttagaggcaccgcctgcccagtgacacatgtttaacggccgcggtaccctaaccgtgcaaaggtagcataatcacttgttccttaaatagggacctgtatgaatggctccacgagggttc

SEQ ID NO: 75044 - DNA, 120 bp, Homo sapiens; identical to SEQ ID NO: 62984
  misc_feature: 646 for SV(C|O) and mtDNA

SEQ ID NO: 75045 - DNA, 120 bp, Homo sapiens; identical to SEQ ID NO: 52485
  misc_feature: 646 for SV(C|O) and mtDNA

SEQ ID NO: 75046 - DNA, 120 bp, Homo sapiens
  misc_feature: 646 for SV(C|O) and mtDNA
tgtaattgagattgctcgggggaataggttatgtgattaggagtagggttaggatgagtgggaagaagaaagagaggaagtaaagtttaattatgcctttttgggttgaggtgatgatgg

SEQ ID NO: 75047 - DNA, 120 bp, Homo sapiens; identical to SEQ ID NO: 57536
  misc_feature: 646 for SV(C|O) and mtDNA

SEQ ID NO: 75048 - DNA, 120 bp, Homo sapiens
  misc_feature: 646 for SV(C|O) and mtDNA
tccttacactattcctcatcacccaactaaaaatattaaacacaaactaccacctacctccctcaccaaagcccataaaaataaaaaattataacaaaccctgagaaccaaaatgaacga

SEQ ID NO: 75049 - DNA, 120 bp, Homo sapiens; identical to SEQ ID NO: 60404
  misc_feature: 646 for SV(C|O) and mtDNA

SEQ ID NO: 75050 - DNA, 120 bp, Homo sapiens
  misc_feature: 646 for SV(C|O) and mtDNA
attaagtattgcaacttactgagggctttgaaggctcttggtctgtatttaacctaaatttctataagattattagtataaaaggggagataggtaggagtagcgtggtaagggcgatga

SEQ ID NO: 75051 - DNA, 120 bp, Homo sapiens
  misc_feature: 646 for SV(C|O) and mtDNA
tatgaaaaaccatcgttgtatttcaactacaagaacaccaatgaccccaatacgcaaaattaaccccctaataaaattaattaaccactcattcatcgacctccccaccccatccaacat

SEQ ID NO: 75052 - DNA, 120 bp, Homo sapiens; identical to SEQ ID NO: 59661
  misc_feature: 646 for SV(C|O) and mtDNA

SEQ ID NO: 75053 - DNA, 120 bp, Homo sapiens
  misc_feature: 646 for SV(C|O) and mtDNA
tacaaaatgccagtatcaggcggcggcttcgaagccaaagtgatgtttggatgtaaagtgaaatattagttggcggatgaagcagatagtgaggaaagttgagccaataatgacgtgaag

SEQ ID NO: 75054 - DNA, 120 bp, Homo sapiens
  misc_feature: 646 for SV(C|O) and mtDNA
ctactataaccaccctaaccctgacttccctaattccccccatccttaccaccctcgttaaccctaacaaaaaaaactcatacccccattatgtaaaatccattgtcgcatccaccttta

SEQ ID NO: 75055 - DNA, 120 bp, Homo sapiens
  misc_feature: 646 for SV(C|O) and mtDNA
gctacattttctaccccagaaaactacgatagcccttatgaaacttaagggtcgaaggtggatttagcagtaaactgagagtagagtgcttagttgaacagggccctgaagcgcgtacac

SEQ ID NO: 75056 - DNA, 120 bp, Homo sapiens
  misc_feature: 646 for SV(C|O) and mtDNA
acataaagccatttaccgtacatagcacattacagtcaaatcccttctcgtccccatggatgacccccctcagataggggtcccttgaccaccatcctccgtgaaatcaatatcccgcac

SEQ ID NO: 75057 - DNA, 120 bp, Homo sapiens
  misc_feature: 646 for SV(C|O) and mtDNA
gtctacaaaatgccagtatcaggcggcggcttcgaagccaaagtgatgtttggatgtaaagtgaaatattagttggcggatgaagcagatagtgaggaaagttgagccaataatgacgtg

SEQ ID NO: 75058 - DNA, 120 bp, Homo sapiens
  misc_feature: 646 for SV(C|O) and mtDNA
gtattagaggcaccgcctgcccagtgacacatgtttaacggccgcggtaccctaaccgtgcaaaggtagcataatcacttgttccttaaatagggacctgtatgaatggctccacgaggg

SEQ ID NO: 75059 - DNA, 120 bp, Homo sapiens; identical to SEQ ID NO: 52294
  misc_feature: 646 for SV(C|O) and mtDNA

SEQ ID NO: 75060 - DNA, 120 bp, Homo sapiens; identical to SEQ ID NO: 57696
  misc_feature: 646 for SV(C|O) and mtDNA

SEQ ID NO: 75061 - DNA, 120 bp, Homo sapiens
  misc_feature: 646 for SV(C|O) and mtDNA
aacgcccataatcatacaaagcccccgcaccaataggatcctcccgaatcaaccctgacccctctccttcataaattattcagcttcctacactattaaagtttaccacaaccaccaccc

SEQ ID NO: 75062 - DNA, 120 bp, Homo sapiens
  misc_feature: 646 for SV(C|O) and mtDNA
ggagtaggagagagggaggtaagagtcagaagcttatgttgtttatgcggggaaacgccatatcgggggcaccgattattaggggaactagtcagttgccaaagcctccgattatgatgg

SEQ ID NO: 75063 - DNA, 120 bp, Homo sapiens
  misc_feature: 646 for SV(C|O) and mtDNA
gatgtgtaggaagaggcagataaagaatattgaggcgccattggcgtgaaggtagcggatgattcagccataatttacgtctcgagtgatgtgggcgattgatgaaaaggcggttgaggc

SEQ ID NO: 75064 - DNA, 120 bp, Homo sapiens
  misc_feature: 646 for SV(C|O) and mtDNA
gatggatagtaatagggcaaggacgcctcctagtttgttagggacggatcggagaattgtgtaggcgaataggaaatatcattcgggcttgatgtggggaggggtgtttaaggggttggc

SEQ ID NO: 75065 - DNA, 120 bp, Homo sapiens
  misc_feature: 646 for SV(C|O) and mtDNA
caaacaacaatccccctctacctaaaactcacagccctcgctgtcactttcctaggacttctaacagccctagacctcaactacctaaccaacaaacttaaaataaaatccccactatgc

SEQ ID NO: 75066 - DNA, 120 bp, Homo sapiens; identical to SEQ ID NO: 55999
  misc_feature: 646 for SV(C|O) and mtDNA

SEQ ID NO: 75067 - DNA, 120 bp, Homo sapiens
  misc_feature: 646 for SV(C|O) and mtDNA
gagctacctaagaacagctaaaagagcacacccgtctatgtagcaaaatagtgggaagatttataggtagaggcgacaaacctaccgagcctggtgatagctggttgtccaagatagaat

SEQ ID NO: 75068 - DNA, 120 bp, Homo sapiens; identical to SEQ ID NO: 53529
  misc_feature: 646 for SV(C|O) and mtDNA

SEQ ID NO: 75069 - DNA, 120 bp, Homo sapiens; identical to SEQ ID NO: 56588
  misc_feature: 646 for SV(C|O) and mtDNA

SEQ ID NO: 75070 - DNA, 120 bp, Homo sapiens
  misc_feature: 646 for SV(C|O) and mtDNA
aactgactagttcccctaataatcggtgcccccgatatggcgtttccccgcataaacaacataagcttctgactcttacctccctctctcctactcctgctcgcatctgctatagtggag

SEQ ID NO: 75071 - DNA, 120 bp, Homo sapiens
  misc_feature: 646 for SV(C|O) and mtDNA
acgtctacaaaatgccagtatcaggcggcggcttcgaagccaaagtgatgtttggatgtaaagtgaaatattagttggcggatgaagcagatagtgaggaaagttgagccaataatgacg

SEQ ID NO: 75072 - DNA, 120 bp, Homo sapiens
  misc_feature: 646 for SV(C|O) and mtDNA
aattgagattgctcgggggaataggttatgtgattaggagtagggttaggatgagtgggaagaagaaagagaggaagtaaagtttaattatgcctttttgggttgaggtgatgatggagg

SEQ ID NO: 75073 - DNA, 120 bp, Homo sapiens; identical to SEQ ID NO: 57986
  misc_feature: 646 for SV(C|O) and mtDNA

SEQ ID NO: 75074 - DNA, 120 bp, Homo sapiens
  misc_feature: 646 for SV(C|O) and mtDNA
cccttctcgtccccatggatgacccccctcagataggggtcccttgaccaccatcctccgtgaaatcaatatcccgcacaagagtgctactctcctcgctccgggcccataacacttggg

SEQ ID NO: 75075 - DNA, 120 bp, Homo sapiens; identical to SEQ ID NO: 59363
  misc_feature: 646 for SV(C|O) and mtDNA

SEQ ID NO: 75076 - DNA, 120 bp, Homo sapiens
  misc_feature: 646 for SV(C|O) and mtDNA
ataccgctcacacctcatatcctccctactatgcctagaaggaataatactatcactgttcattatagctactctcataaccctcaacacccactccctcttagccaatattgtgcctat

SEQ ID NO: 75077 - DNA, 120 bp, Homo sapiens
  misc_feature: 646 for SV(C|O) and mtDNA
acaaaatgccagtatcaggcggcggcttcgaagccaaagtgatgtttggatgtaaagtgaaatattagttggcggatgaagcagatagtgaggaaagttgagccaataatgacgtgaagt

SEQ ID NO: 75078 - DNA, 120 bp, Homo sapiens
  misc_feature: 645 for SV(C|O) and mtDNA
ttttaaaggataacagctatccattggtcttaggccccaaaaattttggtgcaactccaaataaaagtaacaaccatgcacactactataaccaccctaaccctgacttccctaattccc

SEQ ID NO: 75079 - DNA, 120 bp, Homo sapiens; identical to SEQ ID NO: 58676
  misc_feature: 645 for SV(C|O) and mtDNA

SEQ ID NO: 75080 - DNA, 120 bp, Homo sapiens; identical to SEQ ID NO: 62989
  misc_feature: 645 for SV(C|O) and mtDNA

SEQ ID NO: 75081 - DNA, 120 bp, Homo sapiens
  misc_feature: 645 for SV(C|O) and mtDNA
ttgttacttttatttggagttgcaccaaaatttttggggcctaagaccaatggatagctgttatcctttaaaagttgagaaagccatgttgttagacatgggggcatgagttagcagttc

SEQ ID NO: 75082 - DNA, 120 bp, Homo sapiens; identical to SEQ ID NO: 54754
  misc_feature: 645 for SV(C|O) and mtDNA

SEQ ID NO: 75083 - DNA, 120 bp, Homo sapiens
  misc_feature: 645 for SV(C|O) and mtDNA
aaacgtaggcttggattaaggcgacagcgatttctaggatagtcagtagaattagaattgtgaagatgataagtgtagagggaaggttaatggttgatattgctagggtggcgcttccaa

SEQ ID NO: 75084 - DNA, 120 bp, Homo sapiens
  misc_feature: 645 for SV(C|O) and mtDNA
ttcctacacatcgggcgaggcctatattacggatcatttctctactcagaaacctgaaacatcggcattatcctcctgcttgcaactatagcaacagccttcataggctatgtcctcccg

SEQ ID NO: 75085 - DNA, 120 bp, Homo sapiens
  misc_feature: 645 for SV(C|O) and mtDNA
tcaacttttaaaggataacagctatccattggtcttaggccccaaaaattttggtgcaactccaaataaaagtaacaaccatgcacactactataaccaccctaaccctgacttccctaa

SEQ ID NO: 75086 - DNA, 120 bp, Homo sapiens; identical to SEQ ID NO: 53537
  misc_feature: 645 for SV(C|O) and mtDNA

SEQ ID NO: 75087 - DNA, 120 bp, Homo sapiens
  misc_feature: 645 for SV(C|O) and mtDNA
cataaagccatttaccgtacatagcacattacagtcaaatcccttctcgtccccatggatgacccccctcagataggggtcccttgaccaccatcctccgtgaaatcaatatcccgcaca

SEQ ID NO: 75088 - DNA, 120 bp, Homo sapiens
  misc_feature: 645 for SV(C|O) and mtDNA
gtttcatcatgcggagatgttggatggggtggggaggtcgatgaatgagtggttaattaattttattagggggttaattttgcgtattggggtcattggtgttcttgtagttgaaataca

SEQ ID NO: 75089 - DNA, 120 bp, Homo sapiens
  misc_feature: 645 for SV(C|O) and mtDNA
tggtcaagggacccctatctgaggggggtcatccatggggacgagaagggatttgactgtaatgtgctatgtacggtaaatggctttatgtactatgtgctgttaagggtgagtaggttt

SEQ ID NO: 75090 - DNA, 120 bp, Homo sapiens; identical to SEQ ID NO: 57538
  misc_feature: 645 for SV(C|O) and mtDNA

SEQ ID NO: 75091 - DNA, 120 bp, Homo sapiens
  misc_feature: 645 for SV(C|O) and mtDNA
tagccaaccccttaaacacccctccccacatcaagcccgaatgatatttcctattcgcctacacaattctccgatccgtccctaacaaactaggaggcgtccttgccctattactatcca

SEQ ID NO: 75092 - DNA, 120 bp, Homo sapiens; identical to SEQ ID NO: 56758
  misc_feature: 645 for SV(C|O) and mtDNA

SEQ ID NO: 75093 - DNA, 120 bp, Homo sapiens
  misc_feature: 645 for SV(C|O) and mtDNA
tgattgagatgggggctagtttttgtcatgtgagaagaagcaggccggatgtcagaggggtgccttgggtaacctctgggacccagaagtgaaagggggctattcctagttttattgcta

SEQ ID NO: 75094 - DNA, 120 bp, Homo sapiens; identical to SEQ ID NO: 56662
  misc_feature: 645 for SV(C|O) and mtDNA

SEQ ID NO: 75095 - DNA, 120 bp, Homo sapiens
  misc_feature: 645 for SV(C|O) and mtDNA
tagaggcaccgcctgcccagtgacacatgtttaacggccgcggtaccctaaccgtgcaaaggtagcataatcacttgttccttaaatagggacctgtatgaatggctccacgagggttca

SEQ ID NO: 75096 - DNA, 120 bp, Homo sapiens
  misc_feature: 645 for SV(C|O) and mtDNA
tcttcctacacatcgggcgaggcctatattacggatcatttctctactcagaaacctgaaacatcggcattatcctcctgcttgcaactatagcaacagccttcataggctatgtcctcc

SEQ ID NO: 75097 - DNA, 120 bp, Homo sapiens
  misc_feature: 645 for SV(C|O) and mtDNA
catcatgcggagatgttggatggggtggggaggtcgatgaatgagtggttaattaattttattagggggttaattttgcgtattggggtcattggtgttcttgtagttgaaatacaacga

SEQ ID NO: 75098 - DNA, 120 bp, Homo sapiens
  misc_feature: 645 for SV(C|O) and mtDNA
ccagtattagaggcaccgcctgcccagtgacacatgtttaacggccgcggtaccctaaccgtgcaaaggtagcataatcacttgttccttaaatagggacctgtatgaatggctccacga

SEQ ID NO: 75099 - DNA, 120 bp, Homo sapiens; identical to SEQ ID NO: 57541
  misc_feature: 645 for SV(C|O) and mtDNA

SEQ ID NO: 75100 - DNA, 120 bp, Homo sapiens; identical to SEQ ID NO: 61396
  misc_feature: 645 for SV(C|O) and mtDNA

SEQ ID NO: 75101 - DNA, 120 bp, Homo sapiens; identical to SEQ ID NO: 58914
  misc_feature: 645 for SV(C|O) and mtDNA

SEQ ID NO: 75102 - DNA, 120 bp, Homo sapiens
  misc_feature: 645 for SV(C|O) and mtDNA
tcctatccctcaaccccgacatcattaccgggttttcctcttgtaaatatagtttaaccaaaacatcagattgtgaatctgacaacagaggcttacgaccccttatttaccgagaaagct

SEQ ID NO: 75103 - DNA, 120 bp, Homo sapiens
  misc_feature: 645 for SV(C|O) and mtDNA
tcacgtaggactttaatcgttgaacaaacgaacctttaatagcggctgcaccatcgggatgtcctgatccaacatcgaggtcgtaaaccctattgttgatatggactctagaataggatt

SEQ ID NO: 75104 - DNA, 120 bp, Homo sapiens; identical to SEQ ID NO: 56630
  misc_feature: 645 for SV(C|O) and mtDNA

SEQ ID NO: 75105 - DNA, 120 bp, Homo sapiens
  misc_feature: 645 for SV(C|O) and mtDNA
tagtgtaaggagtatgggggtaattatggtgggccatacggtagtatttagttggggcatttcactgtaaagaggtgttggttctcttaatctttaacttaaaaggttaatgctaagtta

SEQ ID NO: 75106 - DNA, 120 bp, Homo sapiens; identical to SEQ ID NO: 58559
  misc_feature: 645 for SV(C|O) and mtDNA

SEQ ID NO: 75107 - DNA, 120 bp, Homo sapiens
  misc_feature: 645 for SV(C|O) and mtDNA
gatggtggtcaagggacccctatctgaggggggtcatccatggggacgagaagggatttgactgtaatgtgctatgtacggtaaatggctttatgtactatgtgctgttaagggtgagta

SEQ ID NO: 75108 - DNA, 120 bp, Homo sapiens; identical to SEQ ID NO: 52800
  misc_feature: 645 for SV(C|O) and mtDNA

SEQ ID NO: 75109 - DNA, 120 bp, Homo sapiens
  misc_feature: 645 for SV(C|O) and mtDNA
taacagctatccattggtcttaggccccaaaaattttggtgcaactccaaataaaagtaacaaccatgcacactactataaccaccctaaccctgacttccctaattccccccatcctta

SEQ ID NO: 75110 - DNA, 120 bp, Homo sapiens; identical to SEQ ID NO: 62278
  misc_feature: 645 for SV(C|O) and mtDNA

SEQ ID NO: 75111 - DNA, 120 bp, Homo sapiens; identical to SEQ ID NO: 57638
  misc_feature: 645 for SV(C|O) and mtDNA

SEQ ID NO: 75112 - DNA, 120 bp, Homo sapiens
  misc_feature: 645 for SV(C|O) and mtDNA
cttcctacacatcgggcgaggcctatattacggatcatttctctactcagaaacctgaaacatcggcattatcctcctgcttgcaactatagcaacagccttcataggctatgtcctccc

SEQ ID NO: 75113 - DNA, 120 bp, Homo sapiens; identical to SEQ ID NO: 60646
  misc_feature: 645 for SV(C|O) and mtDNA

SEQ ID NO: 75114 - DNA, 120 bp, Homo sapiens; identical to SEQ ID NO: 57943
  misc_feature: 645 for SV(C|O) and mtDNA

SEQ ID NO: 75115 - DNA, 120 bp, Homo sapiens
  misc_feature: 645 for SV(C|O) and mtDNA
attatagctactctcataaccctcaacacccactccctcttagccaatattgtgcctattgccatactagtctttgccgcctgcgaagcagcggtgggcctagccctactagtctcaatc

SEQ ID NO: 75116 - DNA, 120 bp, Homo sapiens; identical to SEQ ID NO: 58968
  misc_feature: 645 for SV(C|O) and mtDNA

SEQ ID NO: 75117 - DNA, 120 bp, Homo sapiens
  misc_feature: 645 for SV(C|O) and mtDNA
ccacatagccctcgtagtaacagccattctcatccaaaccccctgaagcttcaccggcgcagtcattctcataatcgcccacggacttacatcctcattactattctgcctagcaaactc

SEQ ID NO: 75118 - DNA, 120 bp, Homo sapiens; identical to SEQ ID NO: 59292
  misc_feature: 645 for SV(C|O) and mtDNA

SEQ ID NO: 75119 - DNA, 120 bp, Homo sapiens
  misc_feature: 645 for SV(C|O) and mtDNA
ctgtgggtggttgtgttgattcaaattatgtgttttttggaaagtcatgtcagtggtagtaatataattgttgggacgattagttttagcattggagtaggtttaggttatgtacgtagt

SEQ ID NO: 75120 - DNA, 120 bp, Homo sapiens
  misc_feature: 645 for SV(C|O) and mtDNA
aaccaccctaaccctgacttccctaattccccccatccttaccaccctcgttaaccctaacaaaaaaaactcatacccccattatgtaaaatccattgtcgcatccacctttattatcag

SEQ ID NO: 75121 - DNA, 120 bp, Homo sapiens
  misc_feature: 645 for SV(C|O) and mtDNA
caatcagccacatagccctcgtagtaacagccattctcatccaaaccccctgaagcttcaccggcgcagtcattctcataatcgcccacggacttacatcctcattactattctgcctag

SEQ ID NO: 75122 - DNA, 120 bp, Homo sapiens
  misc_feature: 645 for SV(C|O) and mtDNA
aaatgccagtatcaggcggcggcttcgaagccaaagtgatgtttggatgtaaagtgaaatattagttggcggatgaagcagatagtgaggaaagttgagccaataatgacgtgaagtccg

SEQ ID NO: 75123 - DNA, 120 bp, Homo sapiens
  misc_feature: 645 for SV(C|O) and mtDNA
attgaagagtatgcaatgagcgattttaggtctgtttgtcgtaggcagatggagcttgttataattatgcctcatagggatagtacaaggaaggggtaggctatgtgttttgtcaggggg

SEQ ID NO: 75124 - DNA, 120 bp, Homo sapiens
  misc_feature: 645 for SV(C|O) and mtDNA
atctgtaggctcattcatttctctaacagcagtaatattaataattttcatgatttgagaagccttcgcttcgaagcgaaaagtcctaatagtagaagaaccctccataaacctggagtg

SEQ ID NO: 75125 - DNA, 120 bp, Homo sapiens; identical to SEQ ID NO: 55585
  misc_feature: 645 for SV(C|O) and mtDNA

SEQ ID NO: 75126 - DNA, 120 bp, Homo sapiens; identical to SEQ ID NO: 57707
  misc_feature: 645 for SV(C|O) and mtDNA

SEQ ID NO: 75127 - DNA, 120 bp, Homo sapiens; identical to SEQ ID NO: 59446
  misc_feature: 645 for SV(C|O) and mtDNA

SEQ ID NO: 75128 - DNA, 120 bp, Homo sapiens; identical to SEQ ID NO: 62890
  misc_feature: 644 for SV(C|O) and mtDNA

SEQ ID NO: 75129 - DNA, 120 bp, Homo sapiens; identical to SEQ ID NO: 53473
  misc_feature: 644 for SV(C|O) and mtDNA

SEQ ID NO: 75130 - DNA, 120 bp, Homo sapiens; identical to SEQ ID NO: 55419
  misc_feature: 644 for SV(C|O) and mtDNA

SEQ ID NO: 75131 - DNA, 120 bp, Homo sapiens; identical to SEQ ID NO: 57372
  misc_feature: 644 for SV(C|O) and mtDNA

SEQ ID NO: 75132 - DNA, 120 bp, Homo sapiens; identical to SEQ ID NO: 55311
  misc_feature: 644 for SV(C|O) and mtDNA

SEQ ID NO: 75133 - DNA, 120 bp, Homo sapiens
  misc_feature: 644 for SV(C|O) and mtDNA
acgagaagggatttgactgtaatgtgctatgtacggtaaatggctttatgtactatgtgctgttaagggtgagtaggtttgttggtatcctagtgggtgaggggtggctttggagttgca

SEQ ID NO: 75134 - DNA, 120 bp, Homo sapiens
  misc_feature: 644 for SV(C|O) and mtDNA
tgaaaaaccatcgttgtatttcaactacaagaacaccaatgaccccaatacgcaaaattaaccccctaataaaattaattaaccactcattcatcgacctccccaccccatccaacatct

SEQ ID NO: 75135 - DNA, 120 bp, Homo sapiens
  misc_feature: 644 for SV(C|O) and mtDNA
tctgtaggctcattcatttctctaacagcagtaatattaataattttcatgatttgagaagccttcgcttcgaagcgaaaagtcctaatagtagaagaaccctccataaacctggagtga

SEQ ID NO: 75136 - DNA, 120 bp, Homo sapiens; identical to SEQ ID NO: 54968
  misc_feature: 644 for SV(C|O) and mtDNA

SEQ ID NO: 75137 - DNA, 120 bp, Homo sapiens
  misc_feature: 644 for SV(C|O) and mtDNA
aacttactactccggaaaaaaagaaccatttggatacataggtatggtctgagctatgatatcaattggcttcctagggtttatcgtgtgagcacaccatatatttacagtaggaataga

SEQ ID NO: 75138 - DNA, 120 bp, Homo sapiens
  misc_feature: 644 for SV(C|O) and mtDNA
acgagctacctaagaacagctaaaagagcacacccgtctatgtagcaaaatagtgggaagatttataggtagaggcgacaaacctaccgagcctggtgatagctggttgtccaagataga

SEQ ID NO: 75139 - DNA, 120 bp, Homo sapiens
  misc_feature: 644 for SV(C|O) and mtDNA
attgtaacttactactccggaaaaaaagaaccatttggatacataggtatggtctgagctatgatatcaattggcttcctagggtttatcgtgtgagcacaccatatatttacagtagga

SEQ ID NO: 75140 - DNA, 120 bp, Homo sapiens; identical to SEQ ID NO: 54785
  misc_feature: 644 for SV(C|O) and mtDNA

SEQ ID NO: 75141 - DNA, 120 bp, Homo sapiens; identical to SEQ ID NO: 58057
  misc_feature: 644 for SV(C|O) and mtDNA

SEQ ID NO: 75142 - DNA, 120 bp, Homo sapiens
  misc_feature: 644 for SV(C|O) and mtDNA
taggcttggattaaggcgacagcgatttctaggatagtcagtagaattagaattgtgaagatgataagtgtagagggaaggttaatggttgatattgctagggtggcgcttccaattagg

SEQ ID NO: 75143 - DNA, 120 bp, Homo sapiens
  misc_feature: 644 for SV(C|O) and mtDNA
taacaggggccctctcagccctcctaatgacctccggcctagccatgtgatttcacttccactccataacgctcctcatactaggcctactaaccaacacactaaccatataccaatgat

SEQ ID NO: 75144 - DNA, 120 bp, Homo sapiens; identical to SEQ ID NO: 57515
  misc_feature: 644 for SV(C|O) and mtDNA

SEQ ID NO: 75145 - DNA, 120 bp, Homo sapiens; identical to SEQ ID NO: 62985
  misc_feature: 644 for SV(C|O) and mtDNA

SEQ ID NO: 75146 - DNA, 120 bp, Homo sapiens; identical to SEQ ID NO: 60899
  misc_feature: 644 for SV(C|O) and mtDNA

SEQ ID NO: 75147 - DNA, 120 bp, Homo sapiens
  misc_feature: 644 for SV(C|O) and mtDNA
ctgtaggctcattcatttctctaacagcagtaatattaataattttcatgatttgagaagccttcgcttcgaagcgaaaagtcctaatagtagaagaaccctccataaacctggagtgac

SEQ ID NO: 75148 - DNA, 120 bp, Homo sapiens
  misc_feature: 644 for SV(C|O) and mtDNA
gtaaattatggctgaatcatccgctaccttcacgccaatggcgcctcaatattctttatctgcctcttcctacacatcgggcgaggcctatattacggatcatttctctactcagaaacc

SEQ ID NO: 75149 - DNA, 120 bp, Homo sapiens; identical to SEQ ID NO: 58893
  misc_feature: 644 for SV(C|O) and mtDNA

SEQ ID NO: 75150 - DNA, 120 bp, Homo sapiens
  misc_feature: 644 for SV(C|O) and mtDNA
ctagccaaccccttaaacacccctccccacatcaagcccgaatgatatttcctattcgcctacacaattctccgatccgtccctaacaaactaggaggcgtccttgccctattactatcc

SEQ ID NO: 75151 - DNA, 120 bp, Homo sapiens; identical to SEQ ID NO: 54713
  misc_feature: 644 for SV(C|O) and mtDNA

SEQ ID NO: 75152 - DNA, 120 bp, Homo sapiens
  misc_feature: 644 for SV(C|O) and mtDNA
ggaagcgccaccctagcaatatcaaccattaaccttccctctacacttatcatcttcacaattctaattctactgactatcctagaaatcgctgtcgccttaatccaagcctacgttttc

SEQ ID NO: 75153 - DNA, 120 bp, Homo sapiens; identical to SEQ ID NO: 52741
  misc_feature: 644 for SV(C|O) and mtDNA

SEQ ID NO: 75154 - DNA, 120 bp, Homo sapiens
  misc_feature: 644 for SV(C|O) and mtDNA
gacgagctacctaagaacagctaaaagagcacacccgtctatgtagcaaaatagtgggaagatttataggtagaggcgacaaacctaccgagcctggtgatagctggttgtccaagatag

SEQ ID NO: 75155 - DNA, 120 bp, Homo sapiens
  misc_feature: 644 for SV(C|O) and mtDNA
gaagggatttgactgtaatgtgctatgtacggtaaatggctttatgtactatgtgctgttaagggtgagtaggtttgttggtatcctagtgggtgaggggtggctttggagttgcagttg

SEQ ID NO: 75156 - DNA, 120 bp, Homo sapiens; identical to SEQ ID NO: 53903
  misc_feature: 644 for SV(C|O) and mtDNA

SEQ ID NO: 75157 - DNA, 120 bp, Homo sapiens
  misc_feature: 644 for SV(C|O) and mtDNA
ctccttacactattcctcatcacccaactaaaaatattaaacacaaactaccacctacctccctcaccaaagcccataaaaataaaaaattataacaaaccctgagaaccaaaatgaacg

SEQ ID NO: 75158 - DNA, 120 bp, Homo sapiens; identical to SEQ ID NO: 63105
  misc_feature: 644 for SV(C|O) and mtDNA

SEQ ID NO: 75159 - DNA, 120 bp, Homo sapiens
  misc_feature: 644 for SV(C|O) and mtDNA
accagtattagaggcaccgcctgcccagtgacacatgtttaacggccgcggtaccctaaccgtgcaaaggtagcataatcacttgttccttaaatagggacctgtatgaatggctccacg

SEQ ID NO: 75160 - DNA, 120 bp, Homo sapiens
  misc_feature: 644 for SV(C|O) and mtDNA
cgtctacaaaatgccagtatcaggcggcggcttcgaagccaaagtgatgtttggatgtaaagtgaaatattagttggcggatgaagcagatagtgaggaaagttgagccaataatgacgt

SEQ ID NO: 75161 - DNA, 120 bp, Homo sapiens
  misc_feature: 644 for SV(C|O) and mtDNA
ccttctcgtccccatggatgacccccctcagataggggtcccttgaccaccatcctccgtgaaatcaatatcccgcacaagagtgctactctcctcgctccgggcccataacacttgggg

SEQ ID NO: 75162 - DNA, 120 bp, Homo sapiens
  misc_feature: 644 for SV(C|O) and mtDNA
cctaggattcatctttcttttcaccgtaggcggcctgactggcattgtattagcaaactcatcactagacatcgtactacacgacacgtactacgttgtagctcacttccactatgtcct

SEQ ID NO: 75163 - DNA, 120 bp, Homo sapiens
  misc_feature: 644 for SV(C|O) and mtDNA
cctagcaatatcaaccattaaccttccctctacacttatcatcttcacaattctaattctactgactatcctagaaatcgctgtcgccttaatccaagcctacgttttcacacttctagt

SEQ ID NO: 75164 - DNA, 120 bp, Homo sapiens
  misc_feature: 644 for SV(C|O) and mtDNA
cccatccctgagaatccaaaattctccgtgccacctatcacaccccatcctaaagtaaggtcagctaaataagctatcgggcccataccccgaaaatgttggttatacccttcccgtact

SEQ ID NO: 75165 - DNA, 120 bp, Homo sapiens
  misc_feature: 644 for SV(C|O) and mtDNA
ccatggggacgagaagggatttgactgtaatgtgctatgtacggtaaatggctttatgtactatgtgctgttaagggtgagtaggtttgttggtatcctagtgggtgaggggtggctttg

SEQ ID NO: 75166 - DNA, 120 bp, Homo sapiens
  misc_feature: 644 for SV(C|O) and mtDNA
caatattgtgcctattgccatactagtctttgccgcctgcgaagcagcggtgggcctagccctactagtctcaatctccaacacatatggcctagactacgtacataacctaaacctact

SEQ ID NO: 75167 - DNA, 120 bp, Homo sapiens
  misc_feature: 644 for SV(C|O) and mtDNA
agactgaaccgaattggtatatagtttaaacaaaacgaatgatttcgactcattaaattatgataatcatatttaccaaatgcccctcatttacataaatattatactagcatttaccat

SEQ ID NO: 75168 - DNA, 120 bp, Homo sapiens
  misc_feature: 644 for SV(C|O) and mtDNA
atgattgagatgggggctagtttttgtcatgtgagaagaagcaggccggatgtcagaggggtgccttgggtaacctctgggacccagaagtgaaagggggctattcctagttttattgct

SEQ ID NO: 75169 - DNA, 120 bp, Homo sapiens; identical to SEQ ID NO: 61518
  misc_feature: 644 for SV(C|O) and mtDNA

SEQ ID NO: 75170 - DNA, 120 bp, Homo sapiens
  misc_feature: 644 for SV(C|O) and mtDNA
actataaccaccctaaccctgacttccctaattccccccatccttaccaccctcgttaaccctaacaaaaaaaactcatacccccattatgtaaaatccattgtcgcatccacctttatt

SEQ ID NO: 75171 - DNA, 120 bp, Homo sapiens
  misc_feature: 643 for SV(C|O) and mtDNA
tttattgctatagccattatgattattaatgatgagtattgattggtagtattggttatggttcattgtccggagagtatattgttgaagaggatagctattagaaggattatggatgcg

SEQ ID NO: 75172 - DNA, 120 bp, Homo sapiens
  misc_feature: 643 for SV(C|O) and mtDNA
ctacaaaatgccagtatcaggcggcggcttcgaagccaaagtgatgtttggatgtaaagtgaaatattagttggcggatgaagcagatagtgaggaaagttgagccaataatgacgtgaa

SEQ ID NO: 75173 - DNA, 120 bp, Homo sapiens
  misc_feature: 643 for SV(C|O) and mtDNA
ttatcacctttcatgatcacgccctcataatcattttccttatctgcttcctagtcctgtatgcccttttcctaacactcacaacaaaactaactaatactaacatctcagacgctcagg

SEQ ID NO: 75174 - DNA, 120 bp, Homo sapiens
  misc_feature: 643 for SV(C|O) and mtDNA
tgtagagagagtaaaaaatttaacacccatagtaggcctaaaagcagccaccaattaagaaagcgttcaagctcaacacccactacctaaaaaatcccaaacatataactgaactcctca

SEQ ID NO: 75175 - DNA, 120 bp, Homo sapiens; identical to SEQ ID NO: 58680
  misc_feature: 643 for SV(C|O) and mtDNA

SEQ ID NO: 75176 - DNA, 120 bp, Homo sapiens
  misc_feature: 643 for SV(C|O) and mtDNA
tgattgaagagtatgcaatgagcgattttaggtctgtttgtcgtaggcagatggagcttgttataattatgcctcatagggatagtacaaggaaggggtaggctatgtgttttgtcaggg

SEQ ID NO: 75177 - DNA, 120 bp, Homo sapiens
  misc_feature: 643 for SV(C|O) and mtDNA
attctcctcctatccctcaaccccgacatcattaccgggttttcctcttgtaaatatagtttaaccaaaacatcagattgtgaatctgacaacagaggcttacgaccccttatttaccga

SEQ ID NO: 75178 - DNA, 120 bp, Homo sapiens
  misc_feature: 643 for SV(C|O) and mtDNA
tccaaggacaaatcagagaaaaagtctttaactccaccattagcacccaaagctaagattctaatttaaactattctctgttctttcatggggaagcagatttgggtgccacccaagtat

SEQ ID NO: 75179 - DNA, 120 bp, Homo sapiens
  misc_feature: 643 for SV(C|O) and mtDNA
tcatcatgcggagatgttggatggggtggggaggtcgatgaatgagtggttaattaattttattagggggttaattttgcgtattggggtcattggtgttcttgtagttgaaatacaacg

SEQ ID NO: 75180 - DNA, 120 bp, Homo sapiens; identical to SEQ ID NO: 57606
  misc_feature: 643 for SV(C|O) and mtDNA

SEQ ID NO: 75181 - DNA, 120 bp, Homo sapiens
  misc_feature: 643 for SV(C|O) and mtDNA
tatttcaactacaagaacaccaatgaccccaatacgcaaaattaaccccctaataaaattaattaaccactcattcatcgacctccccaccccatccaacatctccgcatgatgaaactt

SEQ ID NO: 75182 - DNA, 120 bp, Homo sapiens
  misc_feature: 643 for SV(C|O) and mtDNA
tatggctgaatcatccgctaccttcacgccaatggcgcctcaatattctttatctgcctcttcctacacatcgggcgaggcctatattacggatcatttctctactcagaaacctgaaac

SEQ ID NO: 75183 - DNA, 120 bp, Homo sapiens; identical to SEQ ID NO: 53588
  misc_feature: 643 for SV(C|O) and mtDNA

SEQ ID NO: 75184 - DNA, 120 bp, Homo sapiens; identical to SEQ ID NO: 61452
  misc_feature: 643 for SV(C|O) and mtDNA

SEQ ID NO: 75185 - DNA, 120 bp, Homo sapiens
  misc_feature: 643 for SV(C|O) and mtDNA
tagccctcgtagtaacagccattctcatccaaaccccctgaagcttcaccggcgcagtcattctcataatcgcccacggacttacatcctcattactattctgcctagcaaactcaaact

SEQ ID NO: 75186 - DNA, 120 bp, Homo sapiens; identical to SEQ ID NO: 58382
  misc_feature: 643 for SV(C|O) and mtDNA

SEQ ID NO: 75187 - DNA, 120 bp, Homo sapiens
  misc_feature: 643 for SV(C|O) and mtDNA
atagccctcgtagtaacagccattctcatccaaaccccctgaagcttcaccggcgcagtcattctcataatcgcccacggacttacatcctcattactattctgcctagcaaactcaaac

SEQ ID NO: 75188 - DNA, 120 bp, Homo sapiens
  misc_feature: 643 for SV(C|O) and mtDNA
gttattattatgtcctacaagcattaattaattaacacactttagtaagtatgttcgtctgtaatattgaacgtaggtgcgataaataataggatgaggcaggaatcaaagacagatact

SEQ ID NO: 75189 - DNA, 120 bp, Homo sapiens
  misc_feature: 643 for SV(C|O) and mtDNA
aacaacaatccccctctacctaaaactcacagccctcgctgtcactttcctaggacttctaacagccctagacctcaactacctaaccaacaaacttaaaataaaatccccactatgcac

SEQ ID NO: 75190 - DNA, 120 bp, Homo sapiens; identical to SEQ ID NO: 61246
  misc_feature: 643 for SV(C|O) and mtDNA

SEQ ID NO: 75191 - DNA, 120 bp, Homo sapiens
  misc_feature: 643 for SV(C|O) and mtDNA
actccacctcaatcacactactccccatatctaacaacgtaaaaataaaatgacagtttgaacatacaaaacccaccccattcctccccacactcatcgcccttaccacgctactcctac

SEQ ID NO: 75192 - DNA, 120 bp, Homo sapiens; identical to SEQ ID NO: 59793
  misc_feature: 643 for SV(C|O) and mtDNA

SEQ ID NO: 75193 - DNA, 120 bp, Homo sapiens; identical to SEQ ID NO: 59988
  misc_feature: 643 for SV(C|O) and mtDNA

SEQ ID NO: 75194 - DNA, 120 bp, Homo sapiens; identical to SEQ ID NO: 57147
  misc_feature: 643 for SV(C|O) and mtDNA

SEQ ID NO: 75195 - DNA, 120 bp, Homo sapiens; identical to SEQ ID NO: 56517
  misc_feature: 643 for SV(C|O) and mtDNA

SEQ ID NO: 75196 - DNA, 120 bp, Homo sapiens
  misc_feature: 643 for SV(C|O) and mtDNA
agctacctaagaacagctaaaagagcacacccgtctatgtagcaaaatagtgggaagatttataggtagaggcgacaaacctaccgagcctggtgatagctggttgtccaagatagaatc

SEQ ID NO: 75197 - DNA, 120 bp, Homo sapiens
  misc_feature: 643 for SV(C|O) and mtDNA
ccaccctagcaatatcaaccattaaccttccctctacacttatcatcttcacaattctaattctactgactatcctagaaatcgctgtcgccttaatccaagcctacgttttcacacttc

SEQ ID NO: 75198 - DNA, 120 bp, Homo sapiens
  misc_feature: 643 for SV(C|O) and mtDNA
ctaaccgtgcaaaggtagcataatcacttgttccttaaatagggacctgtatgaatggctccacgagggttcagctgtctcttacttttaaccagtgaaattgacctgcccgtgaagagg

SEQ ID NO: 75199 - DNA, 120 bp, Homo sapiens
  misc_feature: 643 for SV(C|O) and mtDNA
aaagtttaccacaaccaccaccccatcatactctttcacccacagcaccaatcctacctccatcgctaaccccactaaaacactcaccaagacctcaacccctgacccccatgcctcagg

SEQ ID NO: 75200 - DNA, 120 bp, Homo sapiens
  misc_feature: 643 for SV(C|O) and mtDNA
atgaatgaagcgaacagattttcgttcattttggttctcagggtttgttataattttttatttttatgggctttggtgagggaggtaggtggtagtttgtgtttaatatttttagttggg

SEQ ID NO: 75201 - DNA, 120 bp, Homo sapiens
  misc_feature: 643 for SV(C|O) and mtDNA
aacaggggccctctcagccctcctaatgacctccggcctagccatgtgatttcacttccactccataacgctcctcatactaggcctactaaccaacacactaaccatataccaatgatg

SEQ ID NO: 75202 - DNA, 120 bp, Homo sapiens; identical to SEQ ID NO: 61981
  misc_feature: 643 for SV(C|O) and mtDNA

SEQ ID NO: 75203 - DNA, 120 bp, Homo sapiens
  misc_feature: 643 for SV(C|O) and mtDNA
atttcccctattctcaggctacaccctagaccaaacctacgccaaaatccatttcactatcatattcatcggcgtaaatctaactttcttcccacaacactttctcggcctatccggaat

SEQ ID NO: 75204 - DNA, 120 bp, Homo sapiens; identical to SEQ ID NO: 62990
  misc_feature: 643 for SV(C|O) and mtDNA

SEQ ID NO: 75205 - DNA, 120 bp, Homo sapiens
  misc_feature: 643 for SV(C|O) and mtDNA
actcatcattaataatcataatggctatagcaataaaactaggaatagccccctttcacttctgggtcccagaggttacccaaggcacccctctgacatccggcctgcttcttctcacat

SEQ ID NO: 75206 - DNA, 120 bp, Homo sapiens; identical to SEQ ID NO: 57592
  misc_feature: 643 for SV(C|O) and mtDNA

SEQ ID NO: 75207 - DNA, 120 bp, Homo sapiens; identical to SEQ ID NO: 59334
  misc_feature: 643 for SV(C|O) and mtDNA

SEQ ID NO: 75208 - DNA, 120 bp, Homo sapiens
  misc_feature: 643 for SV(C|O) and mtDNA
actactataaccaccctaaccctgacttccctaattccccccatccttaccaccctcgttaaccctaacaaaaaaaactcatacccccattatgtaaaatccattgtcgcatccaccttt

SEQ ID NO: 75209 - DNA, 120 bp, Homo sapiens
  misc_feature: 642 for SV(C|O) and mtDNA
tagatatagtaccgcaagggaaagatgaaaaattataaccaagcataatacagcaaggactaacccctataccttctgcataatgaattaactagaaataactttgcaaggagagccaaa

SEQ ID NO: 75210 - DNA, 120 bp, Homo sapiens; identical to SEQ ID NO: 58728
  misc_feature: 642 for SV(C|O) and mtDNA

SEQ ID NO: 75211 - DNA, 120 bp, Homo sapiens; identical to SEQ ID NO: 57290
  misc_feature: 642 for SV(C|O) and mtDNA

SEQ ID NO: 75212 - DNA, 120 bp, Homo sapiens
  misc_feature: 642 for SV(C|O) and mtDNA
tccccatcctccatatatccaaacaacaaagcataatatttcgcccactaagccaatcactttattgactcctagccgcagacctcctcattctaacctgaatcggaggacaaccagtaa

SEQ ID NO: 75213 - DNA, 120 bp, Homo sapiens; identical to SEQ ID NO: 62160
  misc_feature: 642 for SV(C|O) and mtDNA

SEQ ID NO: 75214 - DNA, 120 bp, Homo sapiens; identical to SEQ ID NO: 62969
  misc_feature: 642 for SV(C|O) and mtDNA

SEQ ID NO: 75215 - DNA, 120 bp, Homo sapiens; identical to SEQ ID NO: 54316
  misc_feature: 642 for SV(C|O) and mtDNA

SEQ ID NO: 75216 - DNA, 120 bp, Homo sapiens
  misc_feature: 642 for SV(C|O) and mtDNA
cgagacgtaaattatggctgaatcatccgctaccttcacgccaatggcgcctcaatattctttatctgcctcttcctacacatcgggcgaggcctatattacggatcatttctctactca

SEQ ID NO: 75217 - DNA, 120 bp, Homo sapiens
  misc_feature: 642 for SV(C|O) and mtDNA
cgattgatgaaaaggcggttgaggcgtctggtgagtagtgcatggctaggaatagtcctgtggtgatttggaggatcaggcaggcgccaaggagtgagccgaagtttcatcatgcggaga

SEQ ID NO: 75218 - DNA, 120 bp, Homo sapiens; identical to SEQ ID NO: 60568
  misc_feature: 642 for SV(C|O) and mtDNA

SEQ ID NO: 75219 - DNA, 120 bp, Homo sapiens
  misc_feature: 642 for SV(C|O) and mtDNA
tatatgattgagatgggggctagtttttgtcatgtgagaagaagcaggccggatgtcagaggggtgccttgggtaacctctgggacccagaagtgaaagggggctattcctagttttatt

SEQ ID NO: 75220 - DNA, 120 bp, Homo sapiens
  misc_feature: 642 for SV(C|O) and mtDNA
gtaggctcattcatttctctaacagcagtaatattaataattttcatgatttgagaagccttcgcttcgaagcgaaaagtcctaatagtagaagaaccctccataaacctggagtgacta

SEQ ID NO: 75221 - DNA, 120 bp, Homo sapiens
  misc_feature: 642 for SV(C|O) and mtDNA
tagtaggcctagtatgaggagcgttatggagtggaagtgaaatcacatggctaggccggaggtcattaggagggctgagagggcccctgttaggggtcatgggctgggttttactatatg

SEQ ID NO: 75222 - DNA, 120 bp, Homo sapiens
  misc_feature: 642 for SV(C|O) and mtDNA
taggcctactcaggtaaaaaatcagtgcgagcttagcgctgtgatgagtgtgcctgcaaagatggtagagtagatgacgggttgggccaggggattaattagtacgggaagggtataacc

SEQ ID NO: 75223 - DNA, 120 bp, Homo sapiens; identical to SEQ ID NO: 60023
  misc_feature: 642 for SV(C|O) and mtDNA

SEQ ID NO: 75224 - DNA, 120 bp, Homo sapiens
  misc_feature: 642 for SV(C|O) and mtDNA
gtatctaatcccagtttgggtcttagctattgtgtgttcagatatgttaaagccactttcgtagtctattttgtgtcagctggagttttttacaactcaggtgagttttagctttattgg

SEQ ID NO: 75225 - DNA, 120 bp, Homo sapiens; identical to SEQ ID NO: 61617
  misc_feature: 642 for SV(C|O) and mtDNA

SEQ ID NO: 75226 - DNA, 120 bp, Homo sapiens
  misc_feature: 642 for SV(C|O) and mtDNA
actcgagacgtaaattatggctgaatcatccgctaccttcacgccaatggcgcctcaatattctttatctgcctcttcctacacatcgggcgaggcctatattacggatcatttctctac

SEQ ID NO: 75227 - DNA, 120 bp, Homo sapiens; identical to SEQ ID NO: 58686
  misc_feature: 642 for SV(C|O) and mtDNA

SEQ ID NO: 75228 - DNA, 120 bp, Homo sapiens; identical to SEQ ID NO: 57359
  misc_feature: 642 for SV(C|O) and mtDNA

SEQ ID NO: 75229 - DNA, 120 bp, Homo sapiens
  misc_feature: 642 for SV(C|O) and mtDNA
gggctacaccttgacctaacgtctttacgtgggtacttgcgcttactttgtagccttcatcagggtttgctgaagatggcggtatataggctgagcaagaggtggtgaggttgatcgggg

SEQ ID NO: 75230 - DNA, 120 bp, Homo sapiens
  misc_feature: 642 for SV(C|O) and mtDNA
ctatccccaccggcgtcaaagtatttagctgactcgccacactccacggaagcaatatgaaatgatctgctgcagtgctctgagccctaggattcatctttcttttcaccgtaggcggcc

SEQ ID NO: 75231 - DNA, 120 bp, Homo sapiens
  misc_feature: 642 for SV(C|O) and mtDNA
gactgaaccgaattggtatatagtttaaacaaaacgaatgatttcgactcattaaattatgataatcatatttaccaaatgcccctcatttacataaatattatactagcatttaccatc

SEQ ID NO: 75232 - DNA, 120 bp, Homo sapiens
  misc_feature: 642 for SV(C|O) and mtDNA
gagattgtttgggctactgctcgcagtgcgccgatcagggcgtagtttgagtttgatgctcaccctgatcagaggattgagtaaacggctaggctagaggtggctagaataaataggagg

SEQ ID NO: 75233 - DNA, 120 bp, Homo sapiens
  misc_feature: 642 for SV(C|O) and mtDNA
cttatcacctttcatgatcacgccctcataatcattttccttatctgcttcctagtcctgtatgcccttttcctaacactcacaacaaaactaactaatactaacatctcagacgctcag

SEQ ID NO: 75234 - DNA, 120 bp, Homo sapiens
  misc_feature: 642 for SV(C|O) and mtDNA
agcaatatcaaccattaaccttccctctacacttatcatcttcacaattctaattctactgactatcctagaaatcgctgtcgccttaatccaagcctacgttttcacacttctagtaag

SEQ ID NO: 75235 - DNA, 120 bp, Homo sapiens
  misc_feature: 642 for SV(C|O) and mtDNA
ctcgagacgtaaattatggctgaatcatccgctaccttcacgccaatggcgcctcaatattctttatctgcctcttcctacacatcgggcgaggcctatattacggatcatttctctact

SEQ ID NO: 75236 - DNA, 120 bp, Homo sapiens
  misc_feature: 642 for SV(C|O) and mtDNA
ctcatcattaataatcataatggctatagcaataaaactaggaatagccccctttcacttctgggtcccagaggttacccaaggcacccctctgacatccggcctgcttcttctcacatg

SEQ ID NO: 75237 - DNA, 120 bp, Homo sapiens
  misc_feature: 642 for SV(C|O) and mtDNA
atattgtaacttactactccggaaaaaaagaaccatttggatacataggtatggtctgagctatgatatcaattggcttcctagggtttatcgtgtgagcacaccatatatttacagtag

SEQ ID NO: 75238 - DNA, 120 bp, Homo sapiens
  misc_feature: 642 for SV(C|O) and mtDNA
ctactccacctcaatcacactactccccatatctaacaacgtaaaaataaaatgacagtttgaacatacaaaacccaccccattcctccccacactcatcgcccttaccacgctactcct

SEQ ID NO: 75239 - DNA, 120 bp, Homo sapiens
  misc_feature: 642 for SV(C|O) and mtDNA
aagtatttagctgactcgccacactccacggaagcaatatgaaatgatctgctgcagtgctctgagccctaggattcatctttcttttcaccgtaggcggcctgactggcattgtattag

SEQ ID NO: 75240 - DNA, 120 bp, Homo sapiens
  misc_feature: 642 for SV(C|O) and mtDNA
aaccgtgcaaaggtagcataatcacttgttccttaaatagggacctgtatgaatggctccacgagggttcagctgtctcttacttttaaccagtgaaattgacctgcccgtgaagaggcg

SEQ ID NO: 75241 - DNA, 120 bp, Homo sapiens; identical to SEQ ID NO: 58192
  misc_feature: 642 for SV(C|O) and mtDNA

SEQ ID NO: 75242 - DNA, 120 bp, Homo sapiens; identical to SEQ ID NO: 61094
  misc_feature: 642 for SV(C|O) and mtDNA

SEQ ID NO: 75243 - DNA, 120 bp, Homo sapiens
  misc_feature: 642 for SV(C|O) and mtDNA
accatcgttgtatttcaactacaagaacaccaatgaccccaatacgcaaaattaaccccctaataaaattaattaaccactcattcatcgacctccccaccccatccaacatctccgcat

SEQ ID NO: 75244 - DNA, 120 bp, Homo sapiens; identical to SEQ ID NO: 57062
  misc_feature: 642 for SV(C|O) and mtDNA

SEQ ID NO: 75245 - DNA, 120 bp, Homo sapiens; identical to SEQ ID NO: 58330
  misc_feature: 642 for SV(C|O) and mtDNA

SEQ ID NO: 75246 - DNA, 120 bp, Homo sapiens; identical to SEQ ID NO: 62955
  misc_feature: 641 for SV(C|O) and mtDNA

SEQ ID NO: 75247 - DNA, 120 bp, Homo sapiens
  misc_feature: 641 for SV(C|O) and mtDNA
cgagctacctaagaacagctaaaagagcacacccgtctatgtagcaaaatagtgggaagatttataggtagaggcgacaaacctaccgagcctggtgatagctggttgtccaagatagaa

SEQ ID NO: 75248 - DNA, 120 bp, Homo sapiens
  misc_feature: 641 for SV(C|O) and mtDNA
tctaggcctactcaggtaaaaaatcagtgcgagcttagcgctgtgatgagtgtgcctgcaaagatggtagagtagatgacgggttgggccaggggattaattagtacgggaagggtataa

SEQ ID NO: 75249 - DNA, 120 bp, Homo sapiens; identical to SEQ ID NO: 59273
  misc_feature: 641 for SV(C|O) and mtDNA

SEQ ID NO: 75250 - DNA, 120 bp, Homo sapiens; identical to SEQ ID NO: 54834
  misc_feature: 641 for SV(C|O) and mtDNA

SEQ ID NO: 75251 - DNA, 120 bp, Homo sapiens
  misc_feature: 641 for SV(C|O) and mtDNA
atggctgaatcatccgctaccttcacgccaatggcgcctcaatattctttatctgcctcttcctacacatcgggcgaggcctatattacggatcatttctctactcagaaacctgaaaca

SEQ ID NO: 75252 - DNA, 120 bp, Homo sapiens
  misc_feature: 641 for SV(C|O) and mtDNA
tgtgggcgattgatgaaaaggcggttgaggcgtctggtgagtagtgcatggctaggaatagtcctgtggtgatttggaggatcaggcaggcgccaaggagtgagccgaagtttcatcatg

SEQ ID NO: 75253 - DNA, 120 bp, Homo sapiens
  misc_feature: 641 for SV(C|O) and mtDNA
tgtgcctattgccatactagtctttgccgcctgcgaagcagcggtgggcctagccctactagtctcaatctccaacacatatggcctagactacgtacataacctaaacctactccaatg

SEQ ID NO: 75254 - DNA, 120 bp, Homo sapiens
  misc_feature: 641 for SV(C|O) and mtDNA
tgtaggagggtaaaatagagacccagtaaaattgtaataagcagtgcttgaattatttggtttcggttgttttctattagactatggtgagctcaggtgattgatactcctgatgcgagt

SEQ ID NO: 75255 - DNA, 120 bp, Homo sapiens; identical to SEQ ID NO: 54219
  misc_feature: 641 for SV(C|O) and mtDNA

SEQ ID NO: 75256 - DNA, 120 bp, Homo sapiens; identical to SEQ ID NO: 56972
  misc_feature: 641 for SV(C|O) and mtDNA

SEQ ID NO: 75257 - DNA, 120 bp, Homo sapiens
  misc_feature: 641 for SV(C|O) and mtDNA
cacccactaggataccaacaaacctactcacccttaacagcacatagtacataaagccatttaccgtacatagcacattacagtcaaatcccttctcgtccccatggatgacccccctca

SEQ ID NO: 75258 - DNA, 120 bp, Homo sapiens; identical to SEQ ID NO: 56191
  misc_feature: 641 for SV(C|O) and mtDNA

SEQ ID NO: 75259 - DNA, 120 bp, Homo sapiens
  misc_feature: 641 for SV(C|O) and mtDNA
tcatcattaataatcataatggctatagcaataaaactaggaatagccccctttcacttctgggtcccagaggttacccaaggcacccctctgacatccggcctgcttcttctcacatga

SEQ ID NO: 75260 - DNA, 120 bp, Homo sapiens; identical to SEQ ID NO: 61612
  misc_feature: 641 for SV(C|O) and mtDNA

SEQ ID NO: 75261 - DNA, 120 bp, Homo sapiens
  misc_feature: 641 for SV(C|O) and mtDNA
taggcacaatattggctaagagggagtgggtgttgagggttatgagagtagctataatgaacagtgatagtattattccttctaggcatagtagggaggatatgaggtgtgagcggtata

SEQ ID NO: 75262 - DNA, 120 bp, Homo sapiens; identical to SEQ ID NO: 59236
  misc_feature: 641 for SV(C|O) and mtDNA

SEQ ID NO: 75263 - DNA, 120 bp, Homo sapiens; identical to SEQ ID NO: 57357
  misc_feature: 641 for SV(C|O) and mtDNA

SEQ ID NO: 75264 - DNA, 120 bp, Homo sapiens
  misc_feature: 641 for SV(C|O) and mtDNA
aacccatccctgagaatccaaaattctccgtgccacctatcacaccccatcctaaagtaaggtcagctaaataagctatcgggcccataccccgaaaatgttggttatacccttcccgta

SEQ ID NO: 75265 - DNA, 120 bp, Homo sapiens
  misc_feature: 641 for SV(C|O) and mtDNA
aagggtgttagtcatgttagcttgtttcaggtgcgagatagtagtagggtcgtggtgctggagtttaagttgagtagtaggaatgcggtagtagttaggataatataaatagttaaatta

SEQ ID NO: 75266 - DNA, 120 bp, Homo sapiens
  misc_feature: 641 for SV(C|O) and mtDNA
actccttacactattcctcatcacccaactaaaaatattaaacacaaactaccacctacctccctcaccaaagcccataaaaataaaaaattataacaaaccctgagaaccaaaatgaac

SEQ ID NO: 75267 - DNA, 120 bp, Homo sapiens
  misc_feature: 641 for SV(C|O) and mtDNA
ccaataccaaacgcccctcttcgtctgatccgtcctaatcacagcagtcctacttctcctatctctcccagtcctagctgctggcatcactatactactaacagaccgcaacctcaacac

SEQ ID NO: 75268 - DNA, 120 bp, Homo sapiens
  misc_feature: 641 for SV(C|O) and mtDNA
cctgacttccctaattccccccatccttaccaccctcgttaaccctaacaaaaaaaactcatacccccattatgtaaaatccattgtcgcatccacctttattatcagtctcttccccac

SEQ ID NO: 75269 - DNA, 120 bp, Homo sapiens
  misc_feature: 641 for SV(C|O) and mtDNA
attgtattagcaaactcatcactagacatcgtactacacgacacgtactacgttgtagctcacttccactatgtcctatcaataggagctgtatttgccatcataggaggcttcattcac

SEQ ID NO: 75270 - DNA, 120 bp, Homo sapiens
  misc_feature: 641 for SV(C|O) and mtDNA
acccatccctgagaatccaaaattctccgtgccacctatcacaccccatcctaaagtaaggtcagctaaataagctatcgggcccataccccgaaaatgttggttatacccttcccgtac

SEQ ID NO: 75271 - DNA, 120 bp, Homo sapiens; identical to SEQ ID NO: 58660
  misc_feature: 641 for SV(C|O) and mtDNA

SEQ ID NO: 75272 - DNA, 120 bp, Homo sapiens; identical to SEQ ID NO: 54203
  misc_feature: 641 for SV(C|O) and mtDNA

SEQ ID NO: 75273 - DNA, 120 bp, Homo sapiens
  misc_feature: 641 for SV(C|O) and mtDNA
ggcttggattaaggcgacagcgatttctaggatagtcagtagaattagaattgtgaagatgataagtgtagagggaaggttaatggttgatattgctagggtggcgcttccaattaggtg

SEQ ID NO: 75274 - DNA, 120 bp, Homo sapiens
  misc_feature: 641 for SV(C|O) and mtDNA
ggcgaggcctatattacggatcatttctctactcagaaacctgaaacatcggcattatcctcctgcttgcaactatagcaacagccttcataggctatgtcctcccgtgaggccaaatat

SEQ ID NO: 75275 - DNA, 120 bp, Homo sapiens; identical to SEQ ID NO: 57455
  misc_feature: 641 for SV(C|O) and mtDNA

SEQ ID NO: 75276 - DNA, 120 bp, Homo sapiens; identical to SEQ ID NO: 62150
  misc_feature: 641 for SV(C|O) and mtDNA

SEQ ID NO: 75277 - DNA, 120 bp, Homo sapiens; identical to SEQ ID NO: 57641
  misc_feature: 641 for SV(C|O) and mtDNA

SEQ ID NO: 75278 - DNA, 120 bp, Homo sapiens
  misc_feature: 641 for SV(C|O) and mtDNA
agttgtagcaggaatcttcttactcatccgcttccaccccctagcagaaaatagcccactaatccaaactctaacactatgcttaggcgctatcaccactctgttcgcagcagtctgcgc

SEQ ID NO: 75279 - DNA, 120 bp, Homo sapiens
  misc_feature: 641 for SV(C|O) and mtDNA
gatgatagccaaggtggggataagtgtggtttcgaagaagatataaaatatgattagttctgtggctgtgaatgttataattaaggagatttgtagggagattagtatagagaggtagag

SEQ ID NO: 75280 - DNA, 120 bp, Homo sapiens
  misc_feature: 641 for SV(C|O) and mtDNA
aatattgtgcctattgccatactagtctttgccgcctgcgaagcagcggtgggcctagccctactagtctcaatctccaacacatatggcctagactacgtacataacctaaacctactc

SEQ ID NO: 75281 - DNA, 120 bp, Homo sapiens
  misc_feature: 641 for SV(C|O) and mtDNA
attaaagtttaccacaaccaccaccccatcatactctttcacccacagcaccaatcctacctccatcgctaaccccactaaaacactcaccaagacctcaacccctgacccccatgcctc

SEQ ID NO: 75282 - DNA, 120 bp, Homo sapiens
  misc_feature: 641 for SV(C|O) and mtDNA
gagaagggatttgactgtaatgtgctatgtacggtaaatggctttatgtactatgtgctgttaagggtgagtaggtttgttggtatcctagtgggtgaggggtggctttggagttgcagt

SEQ ID NO: 75283 - DNA, 120 bp, Homo sapiens
  misc_feature: 641 for SV(C|O) and mtDNA
atttcaactacaagaacaccaatgaccccaatacgcaaaattaaccccctaataaaattaattaaccactcattcatcgacctccccaccccatccaacatctccgcatgatgaaacttc

SEQ ID NO: 75284 - DNA, 120 bp, Homo sapiens
  misc_feature: 641 for SV(C|O) and mtDNA
ctggtagtaaggtggagtgggtttggggctaggtttagctcagagcggtcaagttaagttgaaatctcctaagtgtaagttgggtgctttgtgttaagctacactctggttcgtccaagt

SEQ ID NO: 75285 - DNA, 120 bp, Homo sapiens; identical to SEQ ID NO: 59360
  misc_feature: 641 for SV(C|O) and mtDNA

SEQ ID NO: 75286 - DNA, 120 bp, Homo sapiens; identical to SEQ ID NO: 56952
  misc_feature: 641 for SV(C|O) and mtDNA

SEQ ID NO: 75287 - DNA, 120 bp, Homo sapiens
  misc_feature: 641 for SV(C|O) and mtDNA
agtgtaaggagtatgggggtaattatggtgggccatacggtagtatttagttggggcatttcactgtaaagaggtgttggttctcttaatctttaacttaaaaggttaatgctaagttag

SEQ ID NO: 75288 - DNA, 120 bp, Homo sapiens; identical to SEQ ID NO: 57677
  misc_feature: 641 for SV(C|O) and mtDNA

SEQ ID NO: 75289 - DNA, 120 bp, Homo sapiens
  misc_feature: 641 for SV(C|O) and mtDNA
ccacaaccaccaccccatcatactctttcacccacagcaccaatcctacctccatcgctaaccccactaaaacactcaccaagacctcaacccctgacccccatgcctcaggatactcct

SEQ ID NO: 75290 - DNA, 120 bp, Homo sapiens
  misc_feature: 641 for SV(C|O) and mtDNA
catctgtaggctcattcatttctctaacagcagtaatattaataattttcatgatttgagaagccttcgcttcgaagcgaaaagtcctaatagtagaagaaccctccataaacctggagt

SEQ ID NO: 75291 - DNA, 120 bp, Homo sapiens; identical to SEQ ID NO: 55685
  misc_feature: 641 for SV(C|O) and mtDNA

SEQ ID NO: 75292 - DNA, 120 bp, Homo sapiens
  misc_feature: 641 for SV(C|O) and mtDNA
agttcttgggcagtgagagtgagtagtagaatgtttagtgagcctagggtgttgtgagtgtaaattagtgcgatgagtaggggaagggagcctactagggtgtagaataggaagtatgtg

SEQ ID NO: 75293 - DNA, 120 bp, Homo sapiens; identical to SEQ ID NO: 54987
  misc_feature: 641 for SV(C|O) and mtDNA

SEQ ID NO: 75294 - DNA, 120 bp, Homo sapiens; identical to SEQ ID NO: 58671
  misc_feature: 641 for SV(C|O) and mtDNA

SEQ ID NO: 75295 - DNA, 120 bp, Homo sapiens
  misc_feature: 641 for SV(C|O) and mtDNA
agaaccctccataaacctggagtgactatatggatgccccccaccctaccacacattcgaagaacccgtatacataaaatctagacaaaaaaggaaggaatcgaaccccccaaagctggt

SEQ ID NO: 75296 - DNA, 120 bp, Homo sapiens; identical to SEQ ID NO: 54805
  misc_feature: 640 for SV(C|O) and mtDNA

SEQ ID NO: 75297 - DNA, 120 bp, Homo sapiens
  misc_feature: 640 for SV(C|O) and mtDNA
ttatggctgaatcatccgctaccttcacgccaatggcgcctcaatattctttatctgcctcttcctacacatcgggcgaggcctatattacggatcatttctctactcagaaacctgaaa

SEQ ID NO: 75298 - DNA, 120 bp, Homo sapiens; identical to SEQ ID NO: 53513
  misc_feature: 640 for SV(C|O) and mtDNA

SEQ ID NO: 75299 - DNA, 120 bp, Homo sapiens; identical to SEQ ID NO: 55765
  misc_feature: 640 for SV(C|O) and mtDNA

SEQ ID NO: 75300 - DNA, 120 bp, Homo sapiens
  misc_feature: 640 for SV(C|O) and mtDNA
ttaaaaatgccctagcccacttcttaccacaaggcacacctacaccccttatccccatactagttattatcgaaaccatcagcctactcattcaaccaatagccctggccgtacgcctaa

SEQ ID NO: 75301 - DNA, 120 bp, Homo sapiens; identical to SEQ ID NO: 57833
  misc_feature: 640 for SV(C|O) and mtDNA

SEQ ID NO: 75302 - DNA, 120 bp, Homo sapiens; identical to SEQ ID NO: 57604
  misc_feature: 640 for SV(C|O) and mtDNA

SEQ ID NO: 75303 - DNA, 120 bp, Homo sapiens
  misc_feature: 640 for SV(C|O) and mtDNA
aagggatttgactgtaatgtgctatgtacggtaaatggctttatgtactatgtgctgttaagggtgagtaggtttgttggtatcctagtgggtgaggggtggctttggagttgcagttga

SEQ ID NO: 75304 - DNA, 120 bp, Homo sapiens; identical to SEQ ID NO: 62925
  misc_feature: 640 for SV(C|O) and mtDNA

SEQ ID NO: 75305 - DNA, 120 bp, Homo sapiens; identical to SEQ ID NO: 54472
  misc_feature: 640 for SV(C|O) and mtDNA

SEQ ID NO: 75306 - DNA, 120 bp, Homo sapiens
  misc_feature: 640 for SV(C|O) and mtDNA
tactccacctcaatcacactactccccatatctaacaacgtaaaaataaaatgacagtttgaacatacaaaacccaccccattcctccccacactcatcgcccttaccacgctactccta

SEQ ID NO: 75307 - DNA, 120 bp, Homo sapiens
  misc_feature: 640 for SV(C|O) and mtDNA
gcctattgccatactagtctttgccgcctgcgaagcagcggtgggcctagccctactagtctcaatctccaacacatatggcctagactacgtacataacctaaacctactccaatgcta

SEQ ID NO: 75308 - DNA, 120 bp, Homo sapiens; identical to SEQ ID NO: 59429
  misc_feature: 640 for SV(C|O) and mtDNA

SEQ ID NO: 75309 - DNA, 120 bp, Homo sapiens
  misc_feature: 640 for SV(C|O) and mtDNA
ggtgatgatagccaaggtggggataagtgtggtttcgaagaagatataaaatatgattagttctgtggctgtgaatgttataattaaggagatttgtagggagattagtatagagaggta

SEQ ID NO: 75310 - DNA, 120 bp, Homo sapiens
  misc_feature: 640 for SV(C|O) and mtDNA
gggacccctatctgaggggggtcatccatggggacgagaagggatttgactgtaatgtgctatgtacggtaaatggctttatgtactatgtgctgttaagggtgagtaggtttgttggta

SEQ ID NO: 75311 - DNA, 120 bp, Homo sapiens
  misc_feature: 640 for SV(C|O) and mtDNA
taaaggataacagctatccattggtcttaggccccaaaaattttggtgcaactccaaataaaagtaacaaccatgcacactactataaccaccctaaccctgacttccctaattcccccc

SEQ ID NO: 75312 - DNA, 120 bp, Homo sapiens; identical to SEQ ID NO: 62992
  misc_feature: 640 for SV(C|O) and mtDNA

SEQ ID NO: 75313 - DNA, 120 bp, Homo sapiens
  misc_feature: 640 for SV(C|O) and mtDNA
catcattaataatcataatggctatagcaataaaactaggaatagccccctttcacttctgggtcccagaggttacccaaggcacccctctgacatccggcctgcttcttctcacatgac

SEQ ID NO: 75314 - DNA, 120 bp, Homo sapiens; identical to SEQ ID NO: 56228
  misc_feature: 640 for SV(C|O) and mtDNA

SEQ ID NO: 75315 - DNA, 120 bp, Homo sapiens
  misc_feature: 640 for SV(C|O) and mtDNA
gtaggcttggattaaggcgacagcgatttctaggatagtcagtagaattagaattgtgaagatgataagtgtagagggaaggttaatggttgatattgctagggtggcgcttccaattag

SEQ ID NO: 75316 - DNA, 120 bp, Homo sapiens; identical to SEQ ID NO: 60856
  misc_feature: 640 for SV(C|O) and mtDNA

SEQ ID NO: 75317 - DNA, 120 bp, Homo sapiens; identical to SEQ ID NO: 58083
  misc_feature: 640 for SV(C|O) and mtDNA

SEQ ID NO: 75318 - DNA, 120 bp, Homo sapiens
  misc_feature: 640 for SV(C|O) and mtDNA
gggtgatgatagccaaggtggggataagtgtggtttcgaagaagatataaaatatgattagttctgtggctgtgaatgttataattaaggagatttgtagggagattagtatagagaggt

SEQ ID NO: 75319 - DNA, 120 bp, Homo sapiens
  misc_feature: 640 for SV(C|O) and mtDNA
accctgacttccctaattccccccatccttaccaccctcgttaaccctaacaaaaaaaactcatacccccattatgtaaaatccattgtcgcatccacctttattatcagtctcttcccc

SEQ ID NO: 75320 - DNA, 120 bp, Homo sapiens
  misc_feature: 640 for SV(C|O) and mtDNA
atattgtgcctattgccatactagtctttgccgcctgcgaagcagcggtgggcctagccctactagtctcaatctccaacacatatggcctagactacgtacataacctaaacctactcc

SEQ ID NO: 75321 - DNA, 120 bp, Homo sapiens; identical to SEQ ID NO: 54204
  misc_feature: 640 for SV(C|O) and mtDNA

SEQ ID NO: 75322 - DNA, 120 bp, Homo sapiens; identical to SEQ ID NO: 61368
  misc_feature: 640 for SV(C|O) and mtDNA

SEQ ID NO: 75323 - DNA, 120 bp, Homo sapiens
  misc_feature: 640 for SV(C|O) and mtDNA
gctcgggggaataggttatgtgattaggagtagggttaggatgagtgggaagaagaaagagaggaagtaaagtttaattatgcctttttgggttgaggtgatgatggaggtggagatttg

SEQ ID NO: 75324 - DNA, 120 bp, Homo sapiens
  misc_feature: 640 for SV(C|O) and mtDNA
ctaagaaatatgtctgataaaagagttactttgatagagtaaataataggagcttaaacccccttatttctaggactatgagaatcgaacccatccctgagaatccaaaattctccgtgc

SEQ ID NO: 75325 - DNA, 120 bp, Homo sapiens
  misc_feature: 640 for SV(C|O) and mtDNA
gcaactgactagttcccctaataatcggtgcccccgatatggcgtttccccgcataaacaacataagcttctgactcttacctccctctctcctactcctgctcgcatctgctatagtgg

SEQ ID NO: 75326 - DNA, 120 bp, Homo sapiens; identical to SEQ ID NO: 62121
  misc_feature: 640 for SV(C|O) and mtDNA

SEQ ID NO: 75327 - DNA, 120 bp, Homo sapiens
  misc_feature: 640 for SV(C|O) and mtDNA
ataacccaataccaaacgcccctcttcgtctgatccgtcctaatcacagcagtcctacttctcctatctctcccagtcctagctgctggcatcactatactactaacagaccgcaacctc

SEQ ID NO: 75328 - DNA, 120 bp, Homo sapiens; identical to SEQ ID NO: 61458
  misc_feature: 640 for SV(C|O) and mtDNA

SEQ ID NO: 75329 - DNA, 120 bp, Homo sapiens
  misc_feature: 640 for SV(C|O) and mtDNA
cgtaatataggcctcgcccgatgtgtaggaagaggcagataaagaatattgaggcgccattggcgtgaaggtagcggatgattcagccataatttacgtctcgagtgatgtgggcgattg

SEQ ID NO: 75330 - DNA, 120 bp, Homo sapiens
  misc_feature: 640 for SV(C|O) and mtDNA
acttcaaattcctccctgtacgaaaggacaagagaaataaggcctacttcacaaagcgccttcccccgtaaatgatatcatctcaacttagtattatacccacacccacccaagaacagg

SEQ ID NO: 75331 - DNA, 120 bp, Homo sapiens; identical to SEQ ID NO: 62986
  misc_feature: 640 for SV(C|O) and mtDNA

SEQ ID NO: 75332 - DNA, 120 bp, Homo sapiens
  misc_feature: 640 for SV(C|O) and mtDNA
atgccagtatcaggcggcggcttcgaagccaaagtgatgtttggatgtaaagtgaaatattagttggcggatgaagcagatagtgaggaaagttgagccaataatgacgtgaagtccgtg

SEQ ID NO: 75333 - DNA, 120 bp, Homo sapiens; identical to SEQ ID NO: 58126
  misc_feature: 640 for SV(C|O) and mtDNA

SEQ ID NO: 75334 - DNA, 120 bp, Homo sapiens
  misc_feature: 640 for SV(C|O) and mtDNA
atttcttgccacctcatgggctacaccttgacctaacgtctttacgtgggtacttgcgcttactttgtagccttcatcagggtttgctgaagatggcggtatataggctgagcaagaggt

SEQ ID NO: 75335 - DNA, 120 bp, Homo sapiens
  misc_feature: 640 for SV(C|O) and mtDNA
aggagggtaaaatagagacccagtaaaattgtaataagcagtgcttgaattatttggtttcggttgttttctattagactatggtgagctcaggtgattgatactcctgatgcgagtaat

SEQ ID NO: 75336 - DNA, 120 bp, Homo sapiens; identical to SEQ ID NO: 61607
  misc_feature: 640 for SV(C|O) and mtDNA

SEQ ID NO: 75337 - DNA, 120 bp, Homo sapiens
  misc_feature: 640 for SV(C|O) and mtDNA
aaaaagccggttagcgggggcaggcctcctagggagaggagggtggatggaattaagggtgttagtcatgttagcttgtttcaggtgcgagatagtagtagggtcgtggtgctggagttt

SEQ ID NO: 75338 - DNA, 120 bp, Homo sapiens
  misc_feature: 639 for SV(C|O) and mtDNA
tttggaggatcaggcaggcgccaaggagtgagccgaagtttcatcatgcggagatgttggatggggtggggaggtcgatgaatgagtggttaattaattttattagggggttaattttgc

SEQ ID NO: 75339 - DNA, 120 bp, Homo sapiens
  misc_feature: 639 for SV(C|O) and mtDNA
ttctcctcctatccctcaaccccgacatcattaccgggttttcctcttgtaaatatagtttaaccaaaacatcagattgtgaatctgacaacagaggcttacgaccccttatttaccgag

SEQ ID NO: 75340 - DNA, 120 bp, Homo sapiens
  misc_feature: 639 for SV(C|O) and mtDNA
ttcccctattctcaggctacaccctagaccaaacctacgccaaaatccatttcactatcatattcatcggcgtaaatctaactttcttcccacaacactttctcggcctatccggaatgc

SEQ ID NO: 75341 - DNA, 120 bp, Homo sapiens
  misc_feature: 639 for SV(C|O) and mtDNA
aacactcaccaagacctcaacccctgacccccatgcctcaggatactcctcaatagccatcgctgtagtatatccaaagacaaccatcattccccctaaataaattaaaaaaactattaa

SEQ ID NO: 75342 - DNA, 120 bp, Homo sapiens
  misc_feature: 639 for SV(C|O) and mtDNA
tggaggatcaggcaggcgccaaggagtgagccgaagtttcatcatgcggagatgttggatggggtggggaggtcgatgaatgagtggttaattaattttattagggggttaattttgcgt

SEQ ID NO: 75343 - DNA, 120 bp, Homo sapiens; identical to SEQ ID NO: 62146
  misc_feature: 639 for SV(C|O) and mtDNA

SEQ ID NO: 75344 - DNA, 120 bp, Homo sapiens
  misc_feature: 639 for SV(C|O) and mtDNA
cacatagccctcgtagtaacagccattctcatccaaaccccctgaagcttcaccggcgcagtcattctcataatcgcccacggacttacatcctcattactattctgcctagcaaactca

SEQ ID NO: 75345 - DNA, 120 bp, Homo sapiens
  misc_feature: 639 for SV(C|O) and mtDNA
tgagccctaggattcatctttcttttcaccgtaggcggcctgactggcattgtattagcaaactcatcactagacatcgtactacacgacacgtactacgttgtagctcacttccactat

SEQ ID NO: 75346 - DNA, 120 bp, Homo sapiens
  misc_feature: 639 for SV(C|O) and mtDNA
aatactcatcattaataatcataatggctatagcaataaaactaggaatagccccctttcacttctgggtcccagaggttacccaaggcacccctctgacatccggcctgcttcttctca

SEQ ID NO: 75347 - DNA, 120 bp, Homo sapiens
  misc_feature: 639 for SV(C|O) and mtDNA
tgactattctctacaaaccacaaagacattggaacactatacctattattcggcgcatgagctggagtcctaggcacagctctaagcctccttattcgagccgagctgggccagccaggc

SEQ ID NO: 75348 - DNA, 120 bp, Homo sapiens
  misc_feature: 639 for SV(C|O) and mtDNA
ggtgttagtcatgttagcttgtttcaggtgcgagatagtagtagggtcgtggtgctggagtttaagttgagtagtaggaatgcggtagtagttaggataatataaatagttaaattaaga

SEQ ID NO: 75349 - DNA, 120 bp, Homo sapiens
  misc_feature: 639 for SV(C|O) and mtDNA
ggcgattgatgaaaaggcggttgaggcgtctggtgagtagtgcatggctaggaatagtcctgtggtgatttggaggatcaggcaggcgccaaggagtgagccgaagtttcatcatgcgga

SEQ ID NO: 75350 - DNA, 120 bp, Homo sapiens
  misc_feature: 639 for SV(C|O) and mtDNA
gcgtcttgtagacctacttgcgctgcatgtgccattaagatatataggatttagcctataatttaactttgacaaagttatgaaatggtttttctaatacctttttgaaaaagtcatgga

SEQ ID NO: 75351 - DNA, 120 bp, Homo sapiens
  misc_feature: 639 for SV(C|O) and mtDNA
tattgtaacttactactccggaaaaaaagaaccatttggatacataggtatggtctgagctatgatatcaattggcttcctagggtttatcgtgtgagcacaccatatatttacagtagg

SEQ ID NO: 75352 - DNA, 120 bp, Homo sapiens; identical to SEQ ID NO: 55117
  misc_feature: 639 for SV(C|O) and mtDNA

SEQ ID NO: 75353 - DNA, 120 bp, Homo sapiens; identical to SEQ ID NO: 57997
  misc_feature: 639 for SV(C|O) and mtDNA

SEQ ID NO: 75354 - DNA, 120 bp, Homo sapiens
  misc_feature: 639 for SV(C|O) and mtDNA
tagcgtcttgtagacctacttgcgctgcatgtgccattaagatatataggatttagcctataatttaactttgacaaagttatgaaatggtttttctaatacctttttgaaaaagtcatg

SEQ ID NO: 75355 - DNA, 120 bp, Homo sapiens; identical to SEQ ID NO: 55350
  misc_feature: 639 for SV(C|O) and mtDNA

SEQ ID NO: 75356 - DNA, 120 bp, Homo sapiens; identical to SEQ ID NO: 56343
  misc_feature: 639 for SV(C|O) and mtDNA

SEQ ID NO: 75357 - DNA, 120 bp, Homo sapiens
  misc_feature: 639 for SV(C|O) and mtDNA
ctagcaatatcaaccattaaccttccctctacacttatcatcttcacaattctaattctactgactatcctagaaatcgctgtcgccttaatccaagcctacgttttcacacttctagta

SEQ ID NO: 75358 - DNA, 120 bp, Homo sapiens; identical to SEQ ID NO: 52474
  misc_feature: 639 for SV(C|O) and mtDNA

SEQ ID NO: 75359 - DNA, 120 bp, Homo sapiens
  misc_feature: 639 for SV(C|O) and mtDNA
agtttcatcatgcggagatgttggatggggtggggaggtcgatgaatgagtggttaattaattttattagggggttaattttgcgtattggggtcattggtgttcttgtagttgaaatac

SEQ ID NO: 75360 - DNA, 120 bp, Homo sapiens; identical to SEQ ID NO: 52233
  misc_feature: 639 for SV(C|O) and mtDNA

SEQ ID NO: 75361 - DNA, 120 bp, Homo sapiens
  misc_feature: 639 for SV(C|O) and mtDNA
ggttcactggataagtggcgttggcttgccatgattgtgaggggtaggagtcaggtagttagtattaggaggggggttgttagggggtcggaggaaaaggttggggaacagctaaatagg

SEQ ID NO: 75362 - DNA, 120 bp, Homo sapiens
  misc_feature: 639 for SV(C|O) and mtDNA
ggtcaagggacccctatctgaggggggtcatccatggggacgagaagggatttgactgtaatgtgctatgtacggtaaatggctttatgtactatgtgctgttaagggtgagtaggtttg

SEQ ID NO: 75363 - DNA, 120 bp, Homo sapiens
  misc_feature: 639 for SV(C|O) and mtDNA
ggcaactgactagttcccctaataatcggtgcccccgatatggcgtttccccgcataaacaacataagcttctgactcttacctccctctctcctactcctgctcgcatctgctatagtg

SEQ ID NO: 75364 - DNA, 120 bp, Homo sapiens
  misc_feature: 639 for SV(C|O) and mtDNA
ggatttgactgtaatgtgctatgtacggtaaatggctttatgtactatgtgctgttaagggtgagtaggtttgttggtatcctagtgggtgaggggtggctttggagttgcagttgatgt

SEQ ID NO: 75365 - DNA, 120 bp, Homo sapiens
  misc_feature: 639 for SV(C|O) and mtDNA
gcgattgatgaaaaggcggttgaggcgtctggtgagtagtgcatggctaggaatagtcctgtggtgatttggaggatcaggcaggcgccaaggagtgagccgaagtttcatcatgcggag

SEQ ID NO: 75366 - DNA, 120 bp, Homo sapiens
  misc_feature: 639 for SV(C|O) and mtDNA
atcgctatccccaccggcgtcaaagtatttagctgactcgccacactccacggaagcaatatgaaatgatctgctgcagtgctctgagccctaggattcatctttcttttcaccgtaggc

SEQ ID NO: 75367 - DNA, 120 bp, Homo sapiens
  misc_feature: 639 for SV(C|O) and mtDNA
gccaccctagcaatatcaaccattaaccttccctctacacttatcatcttcacaattctaattctactgactatcctagaaatcgctgtcgccttaatccaagcctacgttttcacactt

SEQ ID NO: 75368 - DNA, 120 bp, Homo sapiens; identical to SEQ ID NO: 54016
  misc_feature: 639 for SV(C|O) and mtDNA

SEQ ID NO: 75369 - DNA, 120 bp, Homo sapiens
  misc_feature: 639 for SV(C|O) and mtDNA
cagctttggggggttcgattccttccttttttgtctagattttatgtatacgggttcttcgaatgtgtggtagggtggggggcatccatatagtcactccaggtttatggagggttcttc

SEQ ID NO: 75370 - DNA, 120 bp, Homo sapiens
  misc_feature: 639 for SV(C|O) and mtDNA
cttttcgcttcgaagcgaaggcttctcaaatcatgaaaattattaatattactgctgttagagaaatgaatgagcctacagatgataggatgtttcatgtggtgtatgcatcggggtagt

SEQ ID NO: 75371 - DNA, 120 bp, Homo sapiens; identical to SEQ ID NO: 57849
  misc_feature: 639 for SV(C|O) and mtDNA

SEQ ID NO: 75372 - DNA, 120 bp, Homo sapiens
  misc_feature: 639 for SV(C|O) and mtDNA
cttgccacctcatgggctacaccttgacctaacgtctttacgtgggtacttgcgcttactttgtagccttcatcagggtttgctgaagatggcggtatataggctgagcaagaggtggtg

SEQ ID NO: 75373 - DNA, 120 bp, Homo sapiens; identical to SEQ ID NO: 58897
  misc_feature: 639 for SV(C|O) and mtDNA

SEQ ID NO: 75374 - DNA, 120 bp, Homo sapiens
  misc_feature: 639 for SV(C|O) and mtDNA
aaagaaagatgaatcctagggctcagagcactgcagcagatcatttcatattgcttccgtggagtgtggcgagtcagctaaatactttgacgccggtggggatagcgatgattatggtag

SEQ ID NO: 75375 - DNA, 120 bp, Homo sapiens; identical to SEQ ID NO: 56954
  misc_feature: 639 for SV(C|O) and mtDNA

SEQ ID NO: 75376 - DNA, 120 bp, Homo sapiens; identical to SEQ ID NO: 60115
  misc_feature: 639 for SV(C|O) and mtDNA

SEQ ID NO: 75377 - DNA, 120 bp, Homo sapiens; identical to SEQ ID NO: 52124
  misc_feature: 639 for SV(C|O) and mtDNA

SEQ ID NO: 75378 - DNA, 120 bp, Homo sapiens
  misc_feature: 639 for SV(C|O) and mtDNA
ccactaggataccaacaaacctactcacccttaacagcacatagtacataaagccatttaccgtacatagcacattacagtcaaatcccttctcgtccccatggatgacccccctcagat

SEQ ID NO: 75379 - DNA, 120 bp, Homo sapiens
  misc_feature: 639 for SV(C|O) and mtDNA
aaaaaaccttgtagagagagtaaaaaatttaacacccatagtaggcctaaaagcagccaccaattaagaaagcgttcaagctcaacacccactacctaaaaaatcccaaacatataactg

SEQ ID NO: 75380 - DNA, 120 bp, Homo sapiens
  misc_feature: 639 for SV(C|O) and mtDNA
caaactaggaggcgtccttgccctattactatccatcctcatcctagcaataatccccatcctccatatatccaaacaacaaagcataatatttcgcccactaagccaatcactttattg

SEQ ID NO: 75381 - DNA, 120 bp, Homo sapiens; identical to SEQ ID NO: 58255
  misc_feature: 639 for SV(C|O) and mtDNA

SEQ ID NO: 75382 - DNA, 120 bp, Homo sapiens
  misc_feature: 638 for SV(C|O) and mtDNA
acttgggtggcacccaaatctgcttccccatgaaagaacagagaatagtttaaattagaatcttagctttgggtgctaatggtggagttaaagactttttctctgatttgtccttggaaa

SEQ ID NO: 75383 - DNA, 120 bp, Homo sapiens; identical to SEQ ID NO: 58946
  misc_feature: 638 for SV(C|O) and mtDNA

SEQ ID NO: 75384 - DNA, 120 bp, Homo sapiens
  misc_feature: 638 for SV(C|O) and mtDNA
gcaataatccccatcctccatatatccaaacaacaaagcataatatttcgcccactaagccaatcactttattgactcctagccgcagacctcctcattctaacctgaatcggaggacaa

SEQ ID NO: 75385 - DNA, 120 bp, Homo sapiens; identical to SEQ ID NO: 55230
  misc_feature: 638 for SV(C|O) and mtDNA

SEQ ID NO: 75386 - DNA, 120 bp, Homo sapiens
  misc_feature: 638 for SV(C|O) and mtDNA
ttgccacctcatgggctacaccttgacctaacgtctttacgtgggtacttgcgcttactttgtagccttcatcagggtttgctgaagatggcggtatataggctgagcaagaggtggtga

SEQ ID NO: 75387 - DNA, 120 bp, Homo sapiens
  misc_feature: 638 for SV(C|O) and mtDNA
agcacatagtacataaagccatttaccgtacatagcacattacagtcaaatcccttctcgtccccatggatgacccccctcagataggggtcccttgaccaccatcctccgtgaaatcaa

SEQ ID NO: 75388 - DNA, 120 bp, Homo sapiens
  misc_feature: 638 for SV(C|O) and mtDNA
ttcttgccacctcatgggctacaccttgacctaacgtctttacgtgggtacttgcgcttactttgtagccttcatcagggtttgctgaagatggcggtatataggctgagcaagaggtgg

SEQ ID NO: 75389 - DNA, 120 bp, Homo sapiens
  misc_feature: 638 for SV(C|O) and mtDNA
gacgtaaattatggctgaatcatccgctaccttcacgccaatggcgcctcaatattctttatctgcctcttcctacacatcgggcgaggcctatattacggatcatttctctactcagaa

SEQ ID NO: 75390 - DNA, 120 bp, Homo sapiens
  misc_feature: 638 for SV(C|O) and mtDNA
agggtgttagtcatgttagcttgtttcaggtgcgagatagtagtagggtcgtggtgctggagtttaagttgagtagtaggaatgcggtagtagttaggataatataaatagttaaattaa

SEQ ID NO: 75391 - DNA, 120 bp, Homo sapiens
  misc_feature: 638 for SV(C|O) and mtDNA
tattgtgcctattgccatactagtctttgccgcctgcgaagcagcggtgggcctagccctactagtctcaatctccaacacatatggcctagactacgtacataacctaaacctactcca

SEQ ID NO: 75392 - DNA, 120 bp, Homo sapiens; identical to SEQ ID NO: 59371
  misc_feature: 638 for SV(C|O) and mtDNA

SEQ ID NO: 75393 - DNA, 120 bp, Homo sapiens
  misc_feature: 638 for SV(C|O) and mtDNA
tgagattgtttgggctactgctcgcagtgcgccgatcagggcgtagtttgagtttgatgctcaccctgatcagaggattgagtaaacggctaggctagaggtggctagaataaataggag

SEQ ID NO: 75394 - DNA, 120 bp, Homo sapiens; identical to SEQ ID NO: 61397
  misc_feature: 638 for SV(C|O) and mtDNA

SEQ ID NO: 75395 - DNA, 120 bp, Homo sapiens
  misc_feature: 638 for SV(C|O) and mtDNA
tcgaacccatccctgagaatccaaaattctccgtgccacctatcacaccccatcctaaagtaaggtcagctaaataagctatcgggcccataccccgaaaatgttggttatacccttccc

SEQ ID NO: 75396 - DNA, 120 bp, Homo sapiens
  misc_feature: 638 for SV(C|O) and mtDNA
tatcacctttcatgatcacgccctcataatcattttccttatctgcttcctagtcctgtatgcccttttcctaacactcacaacaaaactaactaatactaacatctcagacgctcagga

SEQ ID NO: 75397 - DNA, 120 bp, Homo sapiens
  misc_feature: 638 for SV(C|O) and mtDNA
gtaattgagattgctcgggggaataggttatgtgattaggagtagggttaggatgagtgggaagaagaaagagaggaagtaaagtttaattatgcctttttgggttgaggtgatgatgga

SEQ ID NO: 75398 - DNA, 120 bp, Homo sapiens
  misc_feature: 638 for SV(C|O) and mtDNA
caactgactagttcccctaataatcggtgcccccgatatggcgtttccccgcataaacaacataagcttctgactcttacctccctctctcctactcctgctcgcatctgctatagtgga

SEQ ID NO: 75399 - DNA, 120 bp, Homo sapiens
  misc_feature: 638 for SV(C|O) and mtDNA
gaggatggtggtcaagggacccctatctgaggggggtcatccatggggacgagaagggatttgactgtaatgtgctatgtacggtaaatggctttatgtactatgtgctgttaagggtga

SEQ ID NO: 75400 - DNA, 120 bp, Homo sapiens
  misc_feature: 638 for SV(C|O) and mtDNA
accctagccaaccccttaaacacccctccccacatcaagcccgaatgatatttcctattcgcctacacaattctccgatccgtccctaacaaactaggaggcgtccttgccctattacta

SEQ ID NO: 75401 - DNA, 120 bp, Homo sapiens
  misc_feature: 638 for SV(C|O) and mtDNA
tacaccctagaccaaacctacgccaaaatccatttcactatcatattcatcggcgtaaatctaactttcttcccacaacactttctcggcctatccggaatgccccgacgttactcggac

SEQ ID NO: 75402 - DNA, 120 bp, Homo sapiens; identical to SEQ ID NO: 58532
  misc_feature: 638 for SV(C|O) and mtDNA

SEQ ID NO: 75403 - DNA, 120 bp, Homo sapiens
  misc_feature: 638 for SV(C|O) and mtDNA
atactcatcattaataatcataatggctatagcaataaaactaggaatagccccctttcacttctgggtcccagaggttacccaaggcacccctctgacatccggcctgcttcttctcac

SEQ ID NO: 75404 - DNA, 120 bp, Homo sapiens; identical to SEQ ID NO: 61403
  misc_feature: 638 for SV(C|O) and mtDNA

SEQ ID NO: 75405 - DNA, 120 bp, Homo sapiens; identical to SEQ ID NO: 62956
  misc_feature: 638 for SV(C|O) and mtDNA

SEQ ID NO: 75406 - DNA, 120 bp, Homo sapiens
  misc_feature: 638 for SV(C|O) and mtDNA
gggtgttagtcatgttagcttgtttcaggtgcgagatagtagtagggtcgtggtgctggagtttaagttgagtagtaggaatgcggtagtagttaggataatataaatagttaaattaag

SEQ ID NO: 75407 - DNA, 120 bp, Homo sapiens; identical to SEQ ID NO: 58808
  misc_feature: 638 for SV(C|O) and mtDNA

SEQ ID NO: 75408 - DNA, 120 bp, Homo sapiens
  misc_feature: 638 for SV(C|O) and mtDNA
gccacctcatgggctacaccttgacctaacgtctttacgtgggtacttgcgcttactttgtagccttcatcagggtttgctgaagatggcggtatataggctgagcaagaggtggtgagg

SEQ ID NO: 75409 - DNA, 120 bp, Homo sapiens
  misc_feature: 638 for SV(C|O) and mtDNA
cctagccaaccccttaaacacccctccccacatcaagcccgaatgatatttcctattcgcctacacaattctccgatccgtccctaacaaactaggaggcgtccttgccctattactatc

SEQ ID NO: 75410 - DNA, 120 bp, Homo sapiens
  misc_feature: 638 for SV(C|O) and mtDNA
aggatggtggtcaagggacccctatctgaggggggtcatccatggggacgagaagggatttgactgtaatgtgctatgtacggtaaatggctttatgtactatgtgctgttaagggtgag

SEQ ID NO: 75411 - DNA, 120 bp, Homo sapiens; identical to SEQ ID NO: 60466
  misc_feature: 638 for SV(C|O) and mtDNA

SEQ ID NO: 75412 - DNA, 120 bp, Homo sapiens; identical to SEQ ID NO: 52581
  misc_feature: 638 for SV(C|O) and mtDNA

SEQ ID NO: 75413 - DNA, 120 bp, Homo sapiens
  misc_feature: 638 for SV(C|O) and mtDNA
ccgtaatataggcctcgcccgatgtgtaggaagaggcagataaagaatattgaggcgccattggcgtgaaggtagcggatgattcagccataatttacgtctcgagtgatgtgggcgatt

SEQ ID NO: 75414 - DNA, 120 bp, Homo sapiens
  misc_feature: 638 for SV(C|O) and mtDNA
atctaatcccagtttgggtcttagctattgtgtgttcagatatgttaaagccactttcgtagtctattttgtgtcagctggagttttttacaactcaggtgagttttagctttattgggg

SEQ ID NO: 75415 - DNA, 120 bp, Homo sapiens
  misc_feature: 638 for SV(C|O) and mtDNA
ccatcgttgtatttcaactacaagaacaccaatgaccccaatacgcaaaattaaccccctaataaaattaattaaccactcattcatcgacctccccaccccatccaacatctccgcatg

SEQ ID NO: 75416 - DNA, 120 bp, Homo sapiens
  misc_feature: 638 for SV(C|O) and mtDNA
caggagtaggagagagggaggtaagagtcagaagcttatgttgtttatgcggggaaacgccatatcgggggcaccgattattaggggaactagtcagttgccaaagcctccgattatgat

SEQ ID NO: 75417 - DNA, 120 bp, Homo sapiens; identical to SEQ ID NO: 52847
  misc_feature: 638 for SV(C|O) and mtDNA

SEQ ID NO: 75418 - DNA, 120 bp, Homo sapiens; identical to SEQ ID NO: 52931
  misc_feature: 638 for SV(C|O) and mtDNA

SEQ ID NO: 75419 - DNA, 120 bp, Homo sapiens; identical to SEQ ID NO: 61820
  misc_feature: 637 for SV(C|O) and mtDNA

SEQ ID NO: 75420 - DNA, 120 bp, Homo sapiens
  misc_feature: 637 for SV(C|O) and mtDNA
tgacacaaaatagactacgaaagtggctttaacatatctgaacacacaatagctaagacccaaactgggattagataccccactatgcttagccctaaacctcaacagttaaatcaacaa

SEQ ID NO: 75421 - DNA, 120 bp, Homo sapiens
  misc_feature: 637 for SV(C|O) and mtDNA
ttgtaagcatggggagggggttttgatgtggattgggtttttatgtactacaggtggtcaagtatttatggtaccgtacaatattcatggtggctggcagtaatgtacgaattacatagc

SEQ ID NO: 75422 - DNA, 120 bp, Homo sapiens; identical to SEQ ID NO: 60958
  misc_feature: 637 for SV(C|O) and mtDNA

SEQ ID NO: 75423 - DNA, 120 bp, Homo sapiens
  misc_feature: 637 for SV(C|O) and mtDNA
ttggaggatcaggcaggcgccaaggagtgagccgaagtttcatcatgcggagatgttggatggggtggggaggtcgatgaatgagtggttaattaattttattagggggttaattttgcg

SEQ ID NO: 75424 - DNA, 120 bp, Homo sapiens
  misc_feature: 637 for SV(C|O) and mtDNA
tcattatagctactctcataaccctcaacacccactccctcttagccaatattgtgcctattgccatactagtctttgccgcctgcgaagcagcggtgggcctagccctactagtctcaa

SEQ ID NO: 75425 - DNA, 120 bp, Homo sapiens
  misc_feature: 637 for SV(C|O) and mtDNA
ttcgggaggatcctattggtgcgggggctttgtatgattatgggcgttgattagtagtagttactggttgaacattgtttgttggtgtatatattgtaattgagattgctcgggggaata

SEQ ID NO: 75426 - DNA, 120 bp, Homo sapiens; identical to SEQ ID NO: 60769
  misc_feature: 637 for SV(C|O) and mtDNA

SEQ ID NO: 75427 - DNA, 120 bp, Homo sapiens
  misc_feature: 637 for SV(C|O) and mtDNA
agcaataatccccatcctccatatatccaaacaacaaagcataatatttcgcccactaagccaatcactttattgactcctagccgcagacctcctcattctaacctgaatcggaggaca

SEQ ID NO: 75428 - DNA, 120 bp, Homo sapiens
  misc_feature: 637 for SV(C|O) and mtDNA
tacactattaaagtttaccacaaccaccaccccatcatactctttcacccacagcaccaatcctacctccatcgctaaccccactaaaacactcaccaagacctcaacccctgaccccca

SEQ ID NO: 75429 - DNA, 120 bp, Homo sapiens; identical to SEQ ID NO: 60156
  misc_feature: 637 for SV(C|O) and mtDNA

SEQ ID NO: 75430 - DNA, 120 bp, Homo sapiens
  misc_feature: 637 for SV(C|O) and mtDNA
tggacaggtggtgtgtggtggccttggtatgtgctttctcgtgttacatcgcgccatcattggtatatggttagtgtgttggttagtaggcctagtatgaggagcgttatggagtggaag

SEQ ID NO: 75431 - DNA, 120 bp, Homo sapiens
  misc_feature: 637 for SV(C|O) and mtDNA
tgccacctcatgggctacaccttgacctaacgtctttacgtgggtacttgcgcttactttgtagccttcatcagggtttgctgaagatggcggtatataggctgagcaagaggtggtgag

SEQ ID NO: 75432 - DNA, 120 bp, Homo sapiens; identical to SEQ ID NO: 61275
  misc_feature: 637 for SV(C|O) and mtDNA

SEQ ID NO: 75433 - DNA, 120 bp, Homo sapiens
  misc_feature: 637 for SV(C|O) and mtDNA
agtagcgtcttgtagacctacttgcgctgcatgtgccattaagatatataggatttagcctataatttaactttgacaaagttatgaaatggtttttctaatacctttttgaaaaagtca

SEQ ID NO: 75434 - DNA, 120 bp, Homo sapiens
  misc_feature: 637 for SV(C|O) and mtDNA
tctacaaaatgccagtatcaggcggcggcttcgaagccaaagtgatgtttggatgtaaagtgaaatattagttggcggatgaagcagatagtgaggaaagttgagccaataatgacgtga

SEQ ID NO: 75435 - DNA, 120 bp, Homo sapiens
  misc_feature: 637 for SV(C|O) and mtDNA
tcgagacgtaaattatggctgaatcatccgctaccttcacgccaatggcgcctcaatattctttatctgcctcttcctacacatcgggcgaggcctatattacggatcatttctctactc

SEQ ID NO: 75436 - DNA, 120 bp, Homo sapiens
  misc_feature: 637 for SV(C|O) and mtDNA
gaagcgaacagattttcgttcattttggttctcagggtttgttataattttttatttttatgggctttggtgagggaggtaggtggtagtttgtgtttaatatttttagttgggtgatga

SEQ ID NO: 75437 - DNA, 120 bp, Homo sapiens; identical to SEQ ID NO: 57485
  misc_feature: 637 for SV(C|O) and mtDNA

SEQ ID NO: 75438 - DNA, 120 bp, Homo sapiens; identical to SEQ ID NO: 55424
  misc_feature: 637 for SV(C|O) and mtDNA

SEQ ID NO: 75439 - DNA, 120 bp, Homo sapiens
  misc_feature: 637 for SV(C|O) and mtDNA
tattaaagtttaccacaaccaccaccccatcatactctttcacccacagcaccaatcctacctccatcgctaaccccactaaaacactcaccaagacctcaacccctgacccccatgcct

SEQ ID NO: 75440 - DNA, 120 bp, Homo sapiens
  misc_feature: 637 for SV(C|O) and mtDNA
cactaggataccaacaaacctactcacccttaacagcacatagtacataaagccatttaccgtacatagcacattacagtcaaatcccttctcgtccccatggatgacccccctcagata

SEQ ID NO: 75441 - DNA, 120 bp, Homo sapiens
  misc_feature: 637 for SV(C|O) and mtDNA
tatcatctgtaggctcattcatttctctaacagcagtaatattaataattttcatgatttgagaagccttcgcttcgaagcgaaaagtcctaatagtagaagaaccctccataaacctgg

SEQ ID NO: 75442 - DNA, 120 bp, Homo sapiens; identical to SEQ ID NO: 57781
  misc_feature: 637 for SV(C|O) and mtDNA

SEQ ID NO: 75443 - DNA, 120 bp, Homo sapiens; identical to SEQ ID NO: 58736
  misc_feature: 637 for SV(C|O) and mtDNA

SEQ ID NO: 75444 - DNA, 120 bp, Homo sapiens; identical to SEQ ID NO: 61417
  misc_feature: 637 for SV(C|O) and mtDNA

SEQ ID NO: 75445 - DNA, 120 bp, Homo sapiens
  misc_feature: 637 for SV(C|O) and mtDNA
taagggtgttagtcatgttagcttgtttcaggtgcgagatagtagtagggtcgtggtgctggagtttaagttgagtagtaggaatgcggtagtagttaggataatataaatagttaaatt

SEQ ID NO: 75446 - DNA, 120 bp, Homo sapiens; identical to SEQ ID NO: 53690
  misc_feature: 637 for SV(C|O) and mtDNA

SEQ ID NO: 75447 - DNA, 120 bp, Homo sapiens
  misc_feature: 637 for SV(C|O) and mtDNA
acctcctaggcgacccagacaattataccctagccaaccccttaaacacccctccccacatcaagcccgaatgatatttcctattcgcctacacaattctccgatccgtccctaacaaac

SEQ ID NO: 75448 - DNA, 120 bp, Homo sapiens; identical to SEQ ID NO: 61867
  misc_feature: 637 for SV(C|O) and mtDNA

SEQ ID NO: 75449 - DNA, 120 bp, Homo sapiens
  misc_feature: 637 for SV(C|O) and mtDNA
gtgatgatagccaaggtggggataagtgtggtttcgaagaagatataaaatatgattagttctgtggctgtgaatgttataattaaggagatttgtagggagattagtatagagaggtag

SEQ ID NO: 75450 - DNA, 120 bp, Homo sapiens; identical to SEQ ID NO: 59203
  misc_feature: 637 for SV(C|O) and mtDNA

SEQ ID NO: 75451 - DNA, 120 bp, Homo sapiens; identical to SEQ ID NO: 58630
  misc_feature: 637 for SV(C|O) and mtDNA

SEQ ID NO: 75452 - DNA, 120 bp, Homo sapiens; identical to SEQ ID NO: 58717
  misc_feature: 637 for SV(C|O) and mtDNA

SEQ ID NO: 75453 - DNA, 120 bp, Homo sapiens
  misc_feature: 637 for SV(C|O) and mtDNA
ggctacaccttgacctaacgtctttacgtgggtacttgcgcttactttgtagccttcatcagggtttgctgaagatggcggtatataggctgagcaagaggtggtgaggttgatcggggt

SEQ ID NO: 75454 - DNA, 120 bp, Homo sapiens
  misc_feature: 637 for SV(C|O) and mtDNA
acccctatctgaggggggtcatccatggggacgagaagggatttgactgtaatgtgctatgtacggtaaatggctttatgtactatgtgctgttaagggtgagtaggtttgttggtatcc

SEQ ID NO: 75455 - DNA, 120 bp, Homo sapiens
  misc_feature: 637 for SV(C|O) and mtDNA
accacaaccaccaccccatcatactctttcacccacagcaccaatcctacctccatcgctaaccccactaaaacactcaccaagacctcaacccctgacccccatgcctcaggatactcc

SEQ ID NO: 75456 - DNA, 120 bp, Homo sapiens
  misc_feature: 637 for SV(C|O) and mtDNA
gctatccccaccggcgtcaaagtatttagctgactcgccacactccacggaagcaatatgaaatgatctgctgcagtgctctgagccctaggattcatctttcttttcaccgtaggcggc

SEQ ID NO: 75457 - DNA, 120 bp, Homo sapiens
  misc_feature: 637 for SV(C|O) and mtDNA
aggctacaccctagaccaaacctacgccaaaatccatttcactatcatattcatcggcgtaaatctaactttcttcccacaacactttctcggcctatccggaatgccccgacgttactc

SEQ ID NO: 75458 - DNA, 120 bp, Homo sapiens; identical to SEQ ID NO: 56587
  misc_feature: 637 for SV(C|O) and mtDNA

SEQ ID NO: 75459 - DNA, 120 bp, Homo sapiens
  misc_feature: 637 for SV(C|O) and mtDNA
ctttctcaacttttaaaggataacagctatccattggtcttaggccccaaaaattttggtgcaactccaaataaaagtaacaaccatgcacactactataaccaccctaaccctgacttc

SEQ ID NO: 75460 - DNA, 120 bp, Homo sapiens
  misc_feature: 637 for SV(C|O) and mtDNA
gaacccatccctgagaatccaaaattctccgtgccacctatcacaccccatcctaaagtaaggtcagctaaataagctatcgggcccataccccgaaaatgttggttatacccttcccgt

SEQ ID NO: 75461 - DNA, 120 bp, Homo sapiens
  misc_feature: 637 for SV(C|O) and mtDNA
aagccggttagcgggggcaggcctcctagggagaggagggtggatggaattaagggtgttagtcatgttagcttgtttcaggtgcgagatagtagtagggtcgtggtgctggagtttaag

SEQ ID NO: 75462 - DNA, 120 bp, Homo sapiens; identical to SEQ ID NO: 57466
  misc_feature: 637 for SV(C|O) and mtDNA

SEQ ID NO: 75463 - DNA, 120 bp, Homo sapiens
  misc_feature: 637 for SV(C|O) and mtDNA
aagcgaacagattttcgttcattttggttctcagggtttgttataattttttatttttatgggctttggtgagggaggtaggtggtagtttgtgtttaatatttttagttgggtgatgag

SEQ ID NO: 75464 - DNA, 120 bp, Homo sapiens; identical to SEQ ID NO: 57057
  misc_feature: 637 for SV(C|O) and mtDNA

SEQ ID NO: 75465 - DNA, 120 bp, Homo sapiens; identical to SEQ ID NO: 61092
  misc_feature: 637 for SV(C|O) and mtDNA

SEQ ID NO: 75466 - DNA, 120 bp, Homo sapiens
  misc_feature: 637 for SV(C|O) and mtDNA
agcgtcttgtagacctacttgcgctgcatgtgccattaagatatataggatttagcctataatttaactttgacaaagttatgaaatggtttttctaatacctttttgaaaaagtcatgg

SEQ ID NO: 75467 - DNA, 120 bp, Homo sapiens
  misc_feature: 637 for SV(C|O) and mtDNA
agggacccctatctgaggggggtcatccatggggacgagaagggatttgactgtaatgtgctatgtacggtaaatggctttatgtactatgtgctgttaagggtgagtaggtttgttggt

SEQ ID NO: 75468 - DNA, 120 bp, Homo sapiens
  misc_feature: 636 for SV(C|O) and mtDNA
tttttatgtactacaggtggtcaagtatttatggtaccgtacaatattcatggtggctggcagtaatgtacgaattacatagcggttgttgatgggtgagtcaatacttgggtggcaccc

SEQ ID NO: 75469 - DNA, 120 bp, Homo sapiens
  misc_feature: 636 for SV(C|O) and mtDNA
gacctcctaggcgacccagacaattataccctagccaaccccttaaacacccctccccacatcaagcccgaatgatatttcctattcgcctacacaattctccgatccgtccctaacaaa

SEQ ID NO: 75470 - DNA, 120 bp, Homo sapiens
  misc_feature: 636 for SV(C|O) and mtDNA
ttggtgcaactccaaataaaagtaacaaccatgcacactactataaccaccctaaccctgacttccctaattccccccatccttaccaccctcgttaaccctaacaaaaaaaactcatac

SEQ ID NO: 75471 - DNA, 120 bp, Homo sapiens
  misc_feature: 636 for SV(C|O) and mtDNA
cgatggtgcagccgctattaaaggttcgtttgttcaacgattaaagtcctacgtgatctgagttcagaccggagtaatccaggtcggtttctatctacttcaaattcctccctgtacgaa

SEQ ID NO: 75472 - DNA, 120 bp, Homo sapiens
  misc_feature: 636 for SV(C|O) and mtDNA
ttcattatagctactctcataaccctcaacacccactccctcttagccaatattgtgcctattgccatactagtctttgccgcctgcgaagcagcggtgggcctagccctactagtctca

SEQ ID NO: 75473 - DNA, 120 bp, Homo sapiens
  misc_feature: 636 for SV(C|O) and mtDNA
ttaaagtttaccacaaccaccaccccatcatactctttcacccacagcaccaatcctacctccatcgctaaccccactaaaacactcaccaagacctcaacccctgacccccatgcctca

SEQ ID NO: 75474 - DNA, 120 bp, Homo sapiens; identical to SEQ ID NO: 53151
  misc_feature: 636 for SV(C|O) and mtDNA

SEQ ID NO: 75475 - DNA, 120 bp, Homo sapiens
  misc_feature: 636 for SV(C|O) and mtDNA
cccaataccaaacgcccctcttcgtctgatccgtcctaatcacagcagtcctacttctcctatctctcccagtcctagctgctggcatcactatactactaacagaccgcaacctcaaca

SEQ ID NO: 75476 - DNA, 120 bp, Homo sapiens
  misc_feature: 636 for SV(C|O) and mtDNA
ccaccatcaccctccttaacctctacttctacctacgcctaatctactccacctcaatcacactactccccatatctaacaacgtaaaaataaaatgacagtttgaacatacaaaaccca

SEQ ID NO: 75477 - DNA, 120 bp, Homo sapiens
  misc_feature: 636 for SV(C|O) and mtDNA
tggctgaatcatccgctaccttcacgccaatggcgcctcaatattctttatctgcctcttcctacacatcgggcgaggcctatattacggatcatttctctactcagaaacctgaaacat

SEQ ID NO: 75478 - DNA, 120 bp, Homo sapiens
  misc_feature: 636 for SV(C|O) and mtDNA
tggcattcctaatgcttaccgaacgaaaaattctaggctatatacaactacgcaaaggccccaacgttgtaggcccctacgggctactacaacccttcgctgacgccataaaactcttca

SEQ ID NO: 75479 - DNA, 120 bp, Homo sapiens
  misc_feature: 636 for SV(C|O) and mtDNA
gactattctctacaaaccacaaagacattggaacactatacctattattcggcgcatgagctggagtcctaggcacagctctaagcctccttattcgagccgagctgggccagccaggca

SEQ ID NO: 75480 - DNA, 120 bp, Homo sapiens; identical to SEQ ID NO: 57564
  misc_feature: 636 for SV(C|O) and mtDNA

SEQ ID NO: 75481 - DNA, 120 bp, Homo sapiens
  misc_feature: 636 for SV(C|O) and mtDNA
tctggtagtaaggtggagtgggtttggggctaggtttagctcagagcggtcaagttaagttgaaatctcctaagtgtaagttgggtgctttgtgttaagctacactctggttcgtccaag

SEQ ID NO: 75482 - DNA, 120 bp, Homo sapiens
  misc_feature: 636 for SV(C|O) and mtDNA
tctcctcctatccctcaaccccgacatcattaccgggttttcctcttgtaaatatagtttaaccaaaacatcagattgtgaatctgacaacagaggcttacgaccccttatttaccgaga

SEQ ID NO: 75483 - DNA, 120 bp, Homo sapiens
  misc_feature: 636 for SV(C|O) and mtDNA
tccgtaatataggcctcgcccgatgtgtaggaagaggcagataaagaatattgaggcgccattggcgtgaaggtagcggatgattcagccataatttacgtctcgagtgatgtgggcgat

SEQ ID NO: 75484 - DNA, 120 bp, Homo sapiens
  misc_feature: 636 for SV(C|O) and mtDNA
tcccgatggtgcagccgctattaaaggttcgtttgttcaacgattaaagtcctacgtgatctgagttcagaccggagtaatccaggtcggtttctatctacttcaaattcctccctgtac

SEQ ID NO: 75485 - DNA, 120 bp, Homo sapiens
  misc_feature: 636 for SV(C|O) and mtDNA
aatgaagcgaacagattttcgttcattttggttctcagggtttgttataattttttatttttatgggctttggtgagggaggtaggtggtagtttgtgtttaatatttttagttgggtga

SEQ ID NO: 75486 - DNA, 120 bp, Homo sapiens; identical to SEQ ID NO: 57355
  misc_feature: 636 for SV(C|O) and mtDNA

SEQ ID NO: 75487 - DNA, 120 bp, Homo sapiens; identical to SEQ ID NO: 62949
  misc_feature: 636 for SV(C|O) and mtDNA

SEQ ID NO: 75488 - DNA, 120 bp, Homo sapiens; identical to SEQ ID NO: 62961
  misc_feature: 636 for SV(C|O) and mtDNA

SEQ ID NO: 75489 - DNA, 120 bp, Homo sapiens; identical to SEQ ID NO: 61866
  misc_feature: 636 for SV(C|O) and mtDNA

SEQ ID NO: 75490 - DNA, 120 bp, Homo sapiens
  misc_feature: 636 for SV(C|O) and mtDNA
taaagtttaccacaaccaccaccccatcatactctttcacccacagcaccaatcctacctccatcgctaaccccactaaaacactcaccaagacctcaacccctgacccccatgcctcag

SEQ ID NO: 75491 - DNA, 120 bp, Homo sapiens; identical to SEQ ID NO: 59610
  misc_feature: 636 for SV(C|O) and mtDNA

SEQ ID NO: 75492 - DNA, 120 bp, Homo sapiens
  misc_feature: 636 for SV(C|O) and mtDNA
ccaatattgtgcctattgccatactagtctttgccgcctgcgaagcagcggtgggcctagccctactagtctcaatctccaacacatatggcctagactacgtacataacctaaacctac

SEQ ID NO: 75493 - DNA, 120 bp, Homo sapiens
  misc_feature: 636 for SV(C|O) and mtDNA
acgcccataatcatacaaagcccccgcaccaataggatcctcccgaatcaaccctgacccctctccttcataaattattcagcttcctacactattaaagtttaccacaaccaccacccc

SEQ ID NO: 75494 - DNA, 120 bp, Homo sapiens
  misc_feature: 636 for SV(C|O) and mtDNA
accctaccatcacacaccgcacaatcccctatctaggccttcttacgagccaaaacctgcccctactcctcctagacctaacctgactagaaaagctattacctaaaacaatttcacagc

SEQ ID NO: 75495 - DNA, 120 bp, Homo sapiens; identical to SEQ ID NO: 53716
  misc_feature: 636 for SV(C|O) and mtDNA

SEQ ID NO: 75496 - DNA, 120 bp, Homo sapiens; identical to SEQ ID NO: 61723
  misc_feature: 636 for SV(C|O) and mtDNA

SEQ ID NO: 75497 - DNA, 120 bp, Homo sapiens; identical to SEQ ID NO: 53841
  misc_feature: 636 for SV(C|O) and mtDNA

SEQ ID NO: 75498 - DNA, 120 bp, Homo sapiens; identical to SEQ ID NO: 57056
  misc_feature: 636 for SV(C|O) and mtDNA

SEQ ID NO: 75499 - DNA, 120 bp, Homo sapiens; identical to SEQ ID NO: 58362
  misc_feature: 636 for SV(C|O) and mtDNA

SEQ ID NO: 75500 - DNA, 120 bp, Homo sapiens
  misc_feature: 636 for SV(C|O) and mtDNA
catggggacgagaagggatttgactgtaatgtgctatgtacggtaaatggctttatgtactatgtgctgttaagggtgagtaggtttgttggtatcctagtgggtgaggggtggctttgg

SEQ ID NO: 75501 - DNA, 120 bp, Homo sapiens; identical to SEQ ID NO: 62049
  misc_feature: 636 for SV(C|O) and mtDNA

SEQ ID NO: 75502 - DNA, 120 bp, Homo sapiens
  misc_feature: 636 for SV(C|O) and mtDNA
atatgattgagatgggggctagtttttgtcatgtgagaagaagcaggccggatgtcagaggggtgccttgggtaacctctgggacccagaagtgaaagggggctattcctagttttattg

SEQ ID NO: 75503 - DNA, 120 bp, Homo sapiens
  misc_feature: 636 for SV(C|O) and mtDNA
atgatagccaaggtggggataagtgtggtttcgaagaagatataaaatatgattagttctgtggctgtgaatgttataattaaggagatttgtagggagattagtatagagaggtagagt

SEQ ID NO: 75504 - DNA, 120 bp, Homo sapiens
  misc_feature: 635 for SV(C|O) and mtDNA
cttgggtggcacccaaatctgcttccccatgaaagaacagagaatagtttaaattagaatcttagctttgggtgctaatggtggagttaaagactttttctctgatttgtccttggaaaa

SEQ ID NO: 75505 - DNA, 120 bp, Homo sapiens
  misc_feature: 635 for SV(C|O) and mtDNA
ttgtagagagagtaaaaaatttaacacccatagtaggcctaaaagcagccaccaattaagaaagcgttcaagctcaacacccactacctaaaaaatcccaaacatataactgaactcctc

SEQ ID NO: 75506 - DNA, 120 bp, Homo sapiens
  misc_feature: 635 for SV(C|O) and mtDNA
ttgtaacttactactccggaaaaaaagaaccatttggatacataggtatggtctgagctatgatatcaattggcttcctagggtttatcgtgtgagcacaccatatatttacagtaggaa

SEQ ID NO: 75507 - DNA, 120 bp, Homo sapiens; identical to SEQ ID NO: 62976
  misc_feature: 635 for SV(C|O) and mtDNA

SEQ ID NO: 75508 - DNA, 120 bp, Homo sapiens
  misc_feature: 635 for SV(C|O) and mtDNA
accatcacacaccgcacaatcccctatctaggccttcttacgagccaaaacctgcccctactcctcctagacctaacctgactagaaaagctattacctaaaacaatttcacagcaccaa

SEQ ID NO: 75509 - DNA, 120 bp, Homo sapiens; identical to SEQ ID NO: 58947
  misc_feature: 635 for SV(C|O) and mtDNA

SEQ ID NO: 75510 - DNA, 120 bp, Homo sapiens
  misc_feature: 635 for SV(C|O) and mtDNA
atctacttcaaattcctccctgtacgaaaggacaagagaaataaggcctacttcacaaagcgccttcccccgtaaatgatatcatctcaacttagtattatacccacacccacccaagaa

SEQ ID NO: 75511 - DNA, 120 bp, Homo sapiens
  misc_feature: 635 for SV(C|O) and mtDNA
gtgttagtcatgttagcttgtttcaggtgcgagatagtagtagggtcgtggtgctggagtttaagttgagtagtaggaatgcggtagtagttaggataatataaatagttaaattaagaa

SEQ ID NO: 75512 - DNA, 120 bp, Homo sapiens
  misc_feature: 635 for SV(C|O) and mtDNA
agtcctaatagtagaagaaccctccataaacctggagtgactatatggatgccccccaccctaccacacattcgaagaacccgtatacataaaatctagacaaaaaaggaaggaatcgaa

SEQ ID NO: 75513 - DNA, 120 bp, Homo sapiens
  misc_feature: 635 for SV(C|O) and mtDNA
tacttgggtggcacccaaatctgcttccccatgaaagaacagagaatagtttaaattagaatcttagctttgggtgctaatggtggagttaaagactttttctctgatttgtccttggaa

SEQ ID NO: 75514 - DNA, 120 bp, Homo sapiens
  misc_feature: 635 for SV(C|O) and mtDNA
tagcaatatcaaccattaaccttccctctacacttatcatcttcacaattctaattctactgactatcctagaaatcgctgtcgccttaatccaagcctacgttttcacacttctagtaa

SEQ ID NO: 75515 - DNA, 120 bp, Homo sapiens
  misc_feature: 635 for SV(C|O) and mtDNA
ccctgacttccctaattccccccatccttaccaccctcgttaaccctaacaaaaaaaactcatacccccattatgtaaaatccattgtcgcatccacctttattatcagtctcttcccca

SEQ ID NO: 75516 - DNA, 120 bp, Homo sapiens
  misc_feature: 635 for SV(C|O) and mtDNA
tgcctcttcctacacatcgggcgaggcctatattacggatcatttctctactcagaaacctgaaacatcggcattatcctcctgcttgcaactatagcaacagccttcataggctatgtc

SEQ ID NO: 75517 - DNA, 120 bp, Homo sapiens
  misc_feature: 635 for SV(C|O) and mtDNA
tgatgatagccaaggtggggataagtgtggtttcgaagaagatataaaatatgattagttctgtggctgtgaatgttataattaaggagatttgtagggagattagtatagagaggtaga

SEQ ID NO: 75518 - DNA, 120 bp, Homo sapiens
  misc_feature: 635 for SV(C|O) and mtDNA
tcttgccacctcatgggctacaccttgacctaacgtctttacgtgggtacttgcgcttactttgtagccttcatcagggtttgctgaagatggcggtatataggctgagcaagaggtggt

SEQ ID NO: 75519 - DNA, 120 bp, Homo sapiens
  misc_feature: 635 for SV(C|O) and mtDNA
ccctatggagctttaatttattaatgcaaacagtacctaacaaacccacaggtcctaaactaccaaacctgcattaaaaatttcggttggggcgacctcggagcagaacccaacctccga

SEQ ID NO: 75520 - DNA, 120 bp, Homo sapiens
  misc_feature: 635 for SV(C|O) and mtDNA
aagtttaccacaaccaccaccccatcatactctttcacccacagcaccaatcctacctccatcgctaaccccactaaaacactcaccaagacctcaacccctgacccccatgcctcagga

SEQ ID NO: 75521 - DNA, 120 bp, Homo sapiens; identical to SEQ ID NO: 52170
  misc_feature: 635 for SV(C|O) and mtDNA

SEQ ID NO: 75522 - DNA, 120 bp, Homo sapiens
  misc_feature: 635 for SV(C|O) and mtDNA
tccatggggacgagaagggatttgactgtaatgtgctatgtacggtaaatggctttatgtactatgtgctgttaagggtgagtaggtttgttggtatcctagtgggtgaggggtggcttt

SEQ ID NO: 75523 - DNA, 120 bp, Homo sapiens
  misc_feature: 635 for SV(C|O) and mtDNA
gccagtatcaggcggcggcttcgaagccaaagtgatgtttggatgtaaagtgaaatattagttggcggatgaagcagatagtgaggaaagttgagccaataatgacgtgaagtccgtgga

SEQ ID NO: 75524 - DNA, 120 bp, Homo sapiens
  misc_feature: 635 for SV(C|O) and mtDNA
agtaggcctagtatgaggagcgttatggagtggaagtgaaatcacatggctaggccggaggtcattaggagggctgagagggcccctgttaggggtcatgggctgggttttactatatga

SEQ ID NO: 75525 - DNA, 120 bp, Homo sapiens
  misc_feature: 635 for SV(C|O) and mtDNA
aaacacatagcctaccccttccttgtactatccctatgaggcataattataacaagctccatctgcctacgacaaacagacctaaaatcgctcattgcatactcttcaatcagccacata

SEQ ID NO: 75526 - DNA, 120 bp, Homo sapiens
  misc_feature: 635 for SV(C|O) and mtDNA
tatagttgtagcaggaatcttcttactcatccgcttccaccccctagcagaaaatagcccactaatccaaactctaacactatgcttaggcgctatcaccactctgttcgcagcagtctg

SEQ ID NO: 75527 - DNA, 120 bp, Homo sapiens; identical to SEQ ID NO: 53521
  misc_feature: 635 for SV(C|O) and mtDNA

SEQ ID NO: 75528 - DNA, 120 bp, Homo sapiens
  misc_feature: 635 for SV(C|O) and mtDNA
taaccctgacttccctaattccccccatccttaccaccctcgttaaccctaacaaaaaaaactcatacccccattatgtaaaatccattgtcgcatccacctttattatcagtctcttcc

SEQ ID NO: 75529 - DNA, 120 bp, Homo sapiens; identical to SEQ ID NO: 58531
  misc_feature: 635 for SV(C|O) and mtDNA

SEQ ID NO: 75530 - DNA, 120 bp, Homo sapiens; identical to SEQ ID NO: 54289
  misc_feature: 635 for SV(C|O) and mtDNA

SEQ ID NO: 75531 - DNA, 120 bp, Homo sapiens
  misc_feature: 635 for SV(C|O) and mtDNA
gtgggcgattgatgaaaaggcggttgaggcgtctggtgagtagtgcatggctaggaatagtcctgtggtgatttggaggatcaggcaggcgccaaggagtgagccgaagtttcatcatgc

SEQ ID NO: 75532 - DNA, 120 bp, Homo sapiens
  misc_feature: 635 for SV(C|O) and mtDNA
acttactactccggaaaaaaagaaccatttggatacataggtatggtctgagctatgatatcaattggcttcctagggtttatcgtgtgagcacaccatatatttacagtaggaatagac

SEQ ID NO: 75533 - DNA, 120 bp, Homo sapiens
  misc_feature: 635 for SV(C|O) and mtDNA
actatcctgcccgccatcatcctagtcctcatcgccctcccatccctgcgcatcctttacataacagacgaggtcaacgatccctcccttaccatcaaatcaattggccaccaatggtac

SEQ ID NO: 75534 - DNA, 120 bp, Homo sapiens; identical to SEQ ID NO: 59408
  misc_feature: 635 for SV(C|O) and mtDNA

SEQ ID NO: 75535 - DNA, 120 bp, Homo sapiens
  misc_feature: 635 for SV(C|O) and mtDNA
gggcgattgatgaaaaggcggttgaggcgtctggtgagtagtgcatggctaggaatagtcctgtggtgatttggaggatcaggcaggcgccaaggagtgagccgaagtttcatcatgcgg

SEQ ID NO: 75536 - DNA, 120 bp, Homo sapiens
  misc_feature: 635 for SV(C|O) and mtDNA
aaccctgacttccctaattccccccatccttaccaccctcgttaaccctaacaaaaaaaactcatacccccattatgtaaaatccattgtcgcatccacctttattatcagtctcttccc

SEQ ID NO: 75537 - DNA, 120 bp, Homo sapiens
  misc_feature: 635 for SV(C|O) and mtDNA
ctattaaagtttaccacaaccaccaccccatcatactctttcacccacagcaccaatcctacctccatcgctaaccccactaaaacactcaccaagacctcaacccctgacccccatgcc

SEQ ID NO: 75538 - DNA, 120 bp, Homo sapiens
  misc_feature: 635 for SV(C|O) and mtDNA
ggatggtggtcaagggacccctatctgaggggggtcatccatggggacgagaagggatttgactgtaatgtgctatgtacggtaaatggctttatgtactatgtgctgttaagggtgagt

SEQ ID NO: 75539 - DNA, 120 bp, Homo sapiens
  misc_feature: 635 for SV(C|O) and mtDNA
gctacctaagaacagctaaaagagcacacccgtctatgtagcaaaatagtgggaagatttataggtagaggcgacaaacctaccgagcctggtgatagctggttgtccaagatagaatct

SEQ ID NO: 75540 - DNA, 120 bp, Homo sapiens
  misc_feature: 635 for SV(C|O) and mtDNA
gcgagcaggagtaggagagagggaggtaagagtcagaagcttatgttgtttatgcggggaaacgccatatcgggggcaccgattattaggggaactagtcagttgccaaagcctccgatt

SEQ ID NO: 75541 - DNA, 120 bp, Homo sapiens
  misc_feature: 635 for SV(C|O) and mtDNA
cctatccctcaaccccgacatcattaccgggttttcctcttgtaaatatagtttaaccaaaacatcagattgtgaatctgacaacagaggcttacgaccccttatttaccgagaaagctc

SEQ ID NO: 75542 - DNA, 120 bp, Homo sapiens
  misc_feature: 635 for SV(C|O) and mtDNA
gagcaggagtaggagagagggaggtaagagtcagaagcttatgttgtttatgcggggaaacgccatatcgggggcaccgattattaggggaactagtcagttgccaaagcctccgattat

SEQ ID NO: 75543 - DNA, 120 bp, Homo sapiens
  misc_feature: 635 for SV(C|O) and mtDNA
gaaaaaaccttgtagagagagtaaaaaatttaacacccatagtaggcctaaaagcagccaccaattaagaaagcgttcaagctcaacacccactacctaaaaaatcccaaacatataact

SEQ ID NO: 75544 - DNA, 120 bp, Homo sapiens
  misc_feature: 635 for SV(C|O) and mtDNA
cttacacttaggagatttcaacttaacttgaccgctctgagctaaacctagccccaaacccactccaccttactaccagacaaccttagccaaaccatttacccaaataaagtataggcg

SEQ ID NO: 75545 - DNA, 120 bp, Homo sapiens; identical to SEQ ID NO: 58570
  misc_feature: 635 for SV(C|O) and mtDNA

SEQ ID NO: 75546 - DNA, 120 bp, Homo sapiens; identical to SEQ ID NO: 57794
  misc_feature: 635 for SV(C|O) and mtDNA

SEQ ID NO: 75547 - DNA, 120 bp, Homo sapiens
  misc_feature: 635 for SV(C|O) and mtDNA
ccctagccaaccccttaaacacccctccccacatcaagcccgaatgatatttcctattcgcctacacaattctccgatccgtccctaacaaactaggaggcgtccttgccctattactat

SEQ ID NO: 75548 - DNA, 120 bp, Homo sapiens
  misc_feature: 635 for SV(C|O) and mtDNA
aaaacacatagcctaccccttccttgtactatccctatgaggcataattataacaagctccatctgcctacgacaaacagacctaaaatcgctcattgcatactcttcaatcagccacat

SEQ ID NO: 75549 - DNA, 120 bp, Homo sapiens
  misc_feature: 635 for SV(C|O) and mtDNA
acactattaaagtttaccacaaccaccaccccatcatactctttcacccacagcaccaatcctacctccatcgctaaccccactaaaacactcaccaagacctcaacccctgacccccat

SEQ ID NO: 75550 - DNA, 120 bp, Homo sapiens
  misc_feature: 634 for SV(C|O) and mtDNA
tttcccctattctcaggctacaccctagaccaaacctacgccaaaatccatttcactatcatattcatcggcgtaaatctaactttcttcccacaacactttctcggcctatccggaatg

SEQ ID NO: 75551 - DNA, 120 bp, Homo sapiens
  misc_feature: 634 for SV(C|O) and mtDNA
ttgtaggagggtaaaatagagacccagtaaaattgtaataagcagtgcttgaattatttggtttcggttgttttctattagactatggtgagctcaggtgattgatactcctgatgcgag

SEQ ID NO: 75552 - DNA, 120 bp, Homo sapiens; identical to SEQ ID NO: 62946
  misc_feature: 634 for SV(C|O) and mtDNA

SEQ ID NO: 75553 - DNA, 120 bp, Homo sapiens
  misc_feature: 634 for SV(C|O) and mtDNA
aaagccggttagcgggggcaggcctcctagggagaggagggtggatggaattaagggtgttagtcatgttagcttgtttcaggtgcgagatagtagtagggtcgtggtgctggagtttaa

SEQ ID NO: 75554 - DNA, 120 bp, Homo sapiens; identical to SEQ ID NO: 61034
  misc_feature: 634 for SV(C|O) and mtDNA

SEQ ID NO: 75555 - DNA, 120 bp, Homo sapiens
  misc_feature: 634 for SV(C|O) and mtDNA
tgttagtcatgttagcttgtttcaggtgcgagatagtagtagggtcgtggtgctggagtttaagttgagtagtaggaatgcggtagtagttaggataatataaatagttaaattaagaat

SEQ ID NO: 75556 - DNA, 120 bp, Homo sapiens
  misc_feature: 634 for SV(C|O) and mtDNA
tgtgtaggaagaggcagataaagaatattgaggcgccattggcgtgaaggtagcggatgattcagccataatttacgtctcgagtgatgtgggcgattgatgaaaaggcggttgaggcgt

SEQ ID NO: 75557 - DNA, 120 bp, Homo sapiens
  misc_feature: 634 for SV(C|O) and mtDNA
ctgacttccctaattccccccatccttaccaccctcgttaaccctaacaaaaaaaactcatacccccattatgtaaaatccattgtcgcatccacctttattatcagtctcttccccaca

SEQ ID NO: 75558 - DNA, 120 bp, Homo sapiens
  misc_feature: 634 for SV(C|O) and mtDNA
acaacaatccccctctacctaaaactcacagccctcgctgtcactttcctaggacttctaacagccctagacctcaactacctaaccaacaaacttaaaataaaatccccactatgcaca

SEQ ID NO: 75559 - DNA, 120 bp, Homo sapiens
  misc_feature: 634 for SV(C|O) and mtDNA
tactcatcattaataatcataatggctatagcaataaaactaggaatagccccctttcacttctgggtcccagaggttacccaaggcacccctctgacatccggcctgcttcttctcaca

SEQ ID NO: 75560 - DNA, 120 bp, Homo sapiens
  misc_feature: 634 for SV(C|O) and mtDNA
agcgccaccctagcaatatcaaccattaaccttccctctacacttatcatcttcacaattctaattctactgactatcctagaaatcgctgtcgccttaatccaagcctacgttttcaca

SEQ ID NO: 75561 - DNA, 120 bp, Homo sapiens; identical to SEQ ID NO: 60436
  misc_feature: 634 for SV(C|O) and mtDNA

SEQ ID NO: 75562 - DNA, 120 bp, Homo sapiens
  misc_feature: 634 for SV(C|O) and mtDNA
tctaatcccagtttgggtcttagctattgtgtgttcagatatgttaaagccactttcgtagtctattttgtgtcagctggagttttttacaactcaggtgagttttagctttattgggga

SEQ ID NO: 75563 - DNA, 120 bp, Homo sapiens; identical to SEQ ID NO: 56663
  misc_feature: 634 for SV(C|O) and mtDNA

SEQ ID NO: 75564 - DNA, 120 bp, Homo sapiens
  misc_feature: 634 for SV(C|O) and mtDNA
ctattctcaggctacaccctagaccaaacctacgccaaaatccatttcactatcatattcatcggcgtaaatctaactttcttcccacaacactttctcggcctatccggaatgccccga

SEQ ID NO: 75565 - DNA, 120 bp, Homo sapiens
  misc_feature: 634 for SV(C|O) and mtDNA
aaaaaccttgtagagagagtaaaaaatttaacacccatagtaggcctaaaagcagccaccaattaagaaagcgttcaagctcaacacccactacctaaaaaatcccaaacatataactga

SEQ ID NO: 75566 - DNA, 120 bp, Homo sapiens
  misc_feature: 634 for SV(C|O) and mtDNA
tatctaatcccagtttgggtcttagctattgtgtgttcagatatgttaaagccactttcgtagtctattttgtgtcagctggagttttttacaactcaggtgagttttagctttattggg

SEQ ID NO: 75567 - DNA, 120 bp, Homo sapiens; identical to SEQ ID NO: 59167
  misc_feature: 634 for SV(C|O) and mtDNA

SEQ ID NO: 75568 - DNA, 120 bp, Homo sapiens
  misc_feature: 634 for SV(C|O) and mtDNA
ctcctaggcgacccagacaattataccctagccaaccccttaaacacccctccccacatcaagcccgaatgatatttcctattcgcctacacaattctccgatccgtccctaacaaacta

SEQ ID NO: 75569 - DNA, 120 bp, Homo sapiens; identical to SEQ ID NO: 57837
  misc_feature: 634 for SV(C|O) and mtDNA

SEQ ID NO: 75570 - DNA, 120 bp, Homo sapiens
  misc_feature: 634 for SV(C|O) and mtDNA
gccaatattgtgcctattgccatactagtctttgccgcctgcgaagcagcggtgggcctagccctactagtctcaatctccaacacatatggcctagactacgtacataacctaaaccta

SEQ ID NO: 75571 - DNA, 120 bp, Homo sapiens
  misc_feature: 634 for SV(C|O) and mtDNA
taccgctcacacctcatatcctccctactatgcctagaaggaataatactatcactgttcattatagctactctcataaccctcaacacccactccctcttagccaatattgtgcctatt

SEQ ID NO: 75572 - DNA, 120 bp, Homo sapiens
  misc_feature: 634 for SV(C|O) and mtDNA
taccctagccaaccccttaaacacccctccccacatcaagcccgaatgatatttcctattcgcctacacaattctccgatccgtccctaacaaactaggaggcgtccttgccctattact

SEQ ID NO: 75573 - DNA, 120 bp, Homo sapiens; identical to SEQ ID NO: 61116
  misc_feature: 634 for SV(C|O) and mtDNA

SEQ ID NO: 75574 - DNA, 120 bp, Homo sapiens
  misc_feature: 634 for SV(C|O) and mtDNA
ggaaaaaaccttgtagagagagtaaaaaatttaacacccatagtaggcctaaaagcagccaccaattaagaaagcgttcaagctcaacacccactacctaaaaaatcccaaacatataac

SEQ ID NO: 75575 - DNA, 120 bp, Homo sapiens; identical to SEQ ID NO: 54151
  misc_feature: 634 for SV(C|O) and mtDNA

SEQ ID NO: 75576 - DNA, 120 bp, Homo sapiens
  misc_feature: 634 for SV(C|O) and mtDNA
gtcaagggacccctatctgaggggggtcatccatggggacgagaagggatttgactgtaatgtgctatgtacggtaaatggctttatgtactatgtgctgttaagggtgagtaggtttgt

SEQ ID NO: 75577 - DNA, 120 bp, Homo sapiens; identical to SEQ ID NO: 54422
  misc_feature: 634 for SV(C|O) and mtDNA

SEQ ID NO: 75578 - DNA, 120 bp, Homo sapiens
  misc_feature: 634 for SV(C|O) and mtDNA
ggacccctatctgaggggggtcatccatggggacgagaagggatttgactgtaatgtgctatgtacggtaaatggctttatgtactatgtgctgttaagggtgagtaggtttgttggtat

SEQ ID NO: 75579 - DNA, 120 bp, Homo sapiens; identical to SEQ ID NO: 56946
  misc_feature: 634 for SV(C|O) and mtDNA

SEQ ID NO: 75580 - DNA, 120 bp, Homo sapiens
  misc_feature: 634 for SV(C|O) and mtDNA
actattaaagtttaccacaaccaccaccccatcatactctttcacccacagcaccaatcctacctccatcgctaaccccactaaaacactcaccaagacctcaacccctgacccccatgc

SEQ ID NO: 75581 - DNA, 120 bp, Homo sapiens
  misc_feature: 634 for SV(C|O) and mtDNA
gacccctatctgaggggggtcatccatggggacgagaagggatttgactgtaatgtgctatgtacggtaaatggctttatgtactatgtgctgttaagggtgagtaggtttgttggtatc

SEQ ID NO: 75582 - DNA, 120 bp, Homo sapiens; identical to SEQ ID NO: 57673
  misc_feature: 634 for SV(C|O) and mtDNA

SEQ ID NO: 75583 - DNA, 120 bp, Homo sapiens; identical to SEQ ID NO: 54892
  misc_feature: 634 for SV(C|O) and mtDNA

SEQ ID NO: 75584 - DNA, 120 bp, Homo sapiens
  misc_feature: 634 for SV(C|O) and mtDNA
gaacagattttcgttcattttggttctcagggtttgttataattttttatttttatgggctttggtgagggaggtaggtggtagtttgtgtttaatatttttagttgggtgatgaggaat

SEQ ID NO: 75585 - DNA, 120 bp, Homo sapiens
  misc_feature: 634 for SV(C|O) and mtDNA
cgagaagggatttgactgtaatgtgctatgtacggtaaatggctttatgtactatgtgctgttaagggtgagtaggtttgttggtatcctagtgggtgaggggtggctttggagttgcag

SEQ ID NO: 75586 - DNA, 120 bp, Homo sapiens
  misc_feature: 634 for SV(C|O) and mtDNA
atggaattaagggtgttagtcatgttagcttgtttcaggtgcgagatagtagtagggtcgtggtgctggagtttaagttgagtagtaggaatgcggtagtagttaggataatataaatag

SEQ ID NO: 75587 - DNA, 120 bp, Homo sapiens
  misc_feature: 634 for SV(C|O) and mtDNA
ctattcctcatcacccaactaaaaatattaaacacaaactaccacctacctccctcaccaaagcccataaaaataaaaaattataacaaaccctgagaaccaaaatgaacgaaaatctgt

SEQ ID NO: 75588 - DNA, 120 bp, Homo sapiens; identical to SEQ ID NO: 58274
  misc_feature: 634 for SV(C|O) and mtDNA

SEQ ID NO: 75589 - DNA, 120 bp, Homo sapiens
  misc_feature: 634 for SV(C|O) and mtDNA
cgatgtgtaggaagaggcagataaagaatattgaggcgccattggcgtgaaggtagcggatgattcagccataatttacgtctcgagtgatgtgggcgattgatgaaaaggcggttgagg

SEQ ID NO: 75590 - DNA, 120 bp, Homo sapiens
  misc_feature: 634 for SV(C|O) and mtDNA
cctcctaggcgacccagacaattataccctagccaaccccttaaacacccctccccacatcaagcccgaatgatatttcctattcgcctacacaattctccgatccgtccctaacaaact

SEQ ID NO: 75591 - DNA, 120 bp, Homo sapiens; identical to SEQ ID NO: 55052
  misc_feature: 634 for SV(C|O) and mtDNA

SEQ ID NO: 75592 - DNA, 120 bp, Homo sapiens; identical to SEQ ID NO: 60680
  misc_feature: 634 for SV(C|O) and mtDNA

SEQ ID NO: 75593 - DNA, 120 bp, Homo sapiens
  misc_feature: 634 for SV(C|O) and mtDNA
agcaggagtaggagagagggaggtaagagtcagaagcttatgttgtttatgcggggaaacgccatatcgggggcaccgattattaggggaactagtcagttgccaaagcctccgattatg

SEQ ID NO: 75594 - DNA, 120 bp, Homo sapiens
  misc_feature: 634 for SV(C|O) and mtDNA
caggctacaccctagaccaaacctacgccaaaatccatttcactatcatattcatcggcgtaaatctaactttcttcccacaacactttctcggcctatccggaatgccccgacgttact

SEQ ID NO: 75595 - DNA, 120 bp, Homo sapiens
  misc_feature: 634 for SV(C|O) and mtDNA
agcaatcctatacaaccgtatcggcgatatcggtttcatcctcgccttagcatgatttatcctacactccaactcatgagacccacaacaaatagcccttctaaacgctaatccaagcct

SEQ ID NO: 75596 - DNA, 120 bp, Homo sapiens
  misc_feature: 633 for SV(C|O) and mtDNA
aactggcttcaatctacttctcccgccgccgggaaaaaaggcgggagaagccccggcaggtttgaagctgcttcttcgaatttgcaattcaatatgaaaatcacctcggagctggtaaaa

SEQ ID NO: 75597 - DNA, 120 bp, Homo sapiens
  misc_feature: 633 for SV(C|O) and mtDNA
ccatcacacaccgcacaatcccctatctaggccttcttacgagccaaaacctgcccctactcctcctagacctaacctgactagaaaagctattacctaaaacaatttcacagcaccaaa

SEQ ID NO: 75598 - DNA, 120 bp, Homo sapiens
  misc_feature: 633 for SV(C|O) and mtDNA
catagccctcgtagtaacagccattctcatccaaaccccctgaagcttcaccggcgcagtcattctcataatcgcccacggacttacatcctcattactattctgcctagcaaactcaaa

SEQ ID NO: 75599 - DNA, 120 bp, Homo sapiens
  misc_feature: 633 for SV(C|O) and mtDNA
taacagcacatagtacataaagccatttaccgtacatagcacattacagtcaaatcccttctcgtccccatggatgacccccctcagataggggtcccttgaccaccatcctccgtgaaa

SEQ ID NO: 75600 - DNA, 120 bp, Homo sapiens
  misc_feature: 633 for SV(C|O) and mtDNA
tcagccacatagccctcgtagtaacagccattctcatccaaaccccctgaagcttcaccggcgcagtcattctcataatcgcccacggacttacatcctcattactattctgcctagcaa

SEQ ID NO: 75601 - DNA, 120 bp, Homo sapiens
  misc_feature: 633 for SV(C|O) and mtDNA
acatagccctcgtagtaacagccattctcatccaaaccccctgaagcttcaccggcgcagtcattctcataatcgcccacggacttacatcctcattactattctgcctagcaaactcaa

SEQ ID NO: 75602 - DNA, 120 bp, Homo sapiens
  misc_feature: 633 for SV(C|O) and mtDNA
atcacctttcatgatcacgccctcataatcattttccttatctgcttcctagtcctgtatgcccttttcctaacactcacaacaaaactaactaatactaacatctcagacgctcaggaa

SEQ ID NO: 75603 - DNA, 120 bp, Homo sapiens; identical to SEQ ID NO: 62912
  misc_feature: 633 for SV(C|O) and mtDNA

SEQ ID NO: 75604 - DNA, 120 bp, Homo sapiens; identical to SEQ ID NO: 55529
  misc_feature: 633 for SV(C|O) and mtDNA

SEQ ID NO: 75605 - DNA, 120 bp, Homo sapiens; identical to SEQ ID NO: 57597
  misc_feature: 633 for SV(C|O) and mtDNA

SEQ ID NO: 75606 - DNA, 120 bp, Homo sapiens
  misc_feature: 633 for SV(C|O) and mtDNA
aggcctactcaggtaaaaaatcagtgcgagcttagcgctgtgatgagtgtgcctgcaaagatggtagagtagatgacgggttgggccaggggattaattagtacgggaagggtataacca

SEQ ID NO: 75607 - DNA, 120 bp, Homo sapiens
  misc_feature: 633 for SV(C|O) and mtDNA
tgggtggcacccaaatctgcttccccatgaaagaacagagaatagtttaaattagaatcttagctttgggtgctaatggtggagttaaagactttttctctgatttgtccttggaaaaag

SEQ ID NO: 75608 - DNA, 120 bp, Homo sapiens
  misc_feature: 633 for SV(C|O) and mtDNA
tgggctacattttctaccccagaaaactacgatagcccttatgaaacttaagggtcgaaggtggatttagcagtaaactgagagtagagtgcttagttgaacagggccctgaagcgcgta

SEQ ID NO: 75609 - DNA, 120 bp, Homo sapiens; identical to SEQ ID NO: 55931
  misc_feature: 633 for SV(C|O) and mtDNA

SEQ ID NO: 75610 - DNA, 120 bp, Homo sapiens
  misc_feature: 633 for SV(C|O) and mtDNA
tactcctaatcacataacctattcccccgagcaatctcaattacaatatatacaccaacaaacaatgttcaaccagtaactactactaatcaacgcccataatcatacaaagcccccgca

SEQ ID NO: 75611 - DNA, 120 bp, Homo sapiens
  misc_feature: 633 for SV(C|O) and mtDNA
gaagcgccaccctagcaatatcaaccattaaccttccctctacacttatcatcttcacaattctaattctactgactatcctagaaatcgctgtcgccttaatccaagcctacgttttca

SEQ ID NO: 75612 - DNA, 120 bp, Homo sapiens
  misc_feature: 633 for SV(C|O) and mtDNA
tacccccaagtgttatgggcccggagcgaggagagtagcactcttgtgcgggatattgatttcacggaggatggtggtcaagggacccctatctgaggggggtcatccatggggacgaga

SEQ ID NO: 75613 - DNA, 120 bp, Homo sapiens
  misc_feature: 633 for SV(C|O) and mtDNA
tcccctattctcaggctacaccctagaccaaacctacgccaaaatccatttcactatcatattcatcggcgtaaatctaactttcttcccacaacactttctcggcctatccggaatgcc

SEQ ID NO: 75614 - DNA, 120 bp, Homo sapiens; identical to SEQ ID NO: 57605
  misc_feature: 633 for SV(C|O) and mtDNA

SEQ ID NO: 75615 - DNA, 120 bp, Homo sapiens
  misc_feature: 633 for SV(C|O) and mtDNA
gatggaattaagggtgttagtcatgttagcttgtttcaggtgcgagatagtagtagggtcgtggtgctggagtttaagttgagtagtaggaatgcggtagtagttaggataatataaata

SEQ ID NO: 75616 - DNA, 120 bp, Homo sapiens
  misc_feature: 633 for SV(C|O) and mtDNA
tatccctcaaccccgacatcattaccgggttttcctcttgtaaatatagtttaaccaaaacatcagattgtgaatctgacaacagaggcttacgaccccttatttaccgagaaagctcac

SEQ ID NO: 75617 - DNA, 120 bp, Homo sapiens; identical to SEQ ID NO: 57965
  misc_feature: 633 for SV(C|O) and mtDNA

SEQ ID NO: 75618 - DNA, 120 bp, Homo sapiens
  misc_feature: 633 for SV(C|O) and mtDNA
agatttggtatatgattgagatgggggctagtttttgtcatgtgagaagaagcaggccggatgtcagaggggtgccttgggtaacctctgggacccagaagtgaaagggggctattccta

SEQ ID NO: 75619 - DNA, 120 bp, Homo sapiens
  misc_feature: 633 for SV(C|O) and mtDNA
catattgtaacttactactccggaaaaaaagaaccatttggatacataggtatggtctgagctatgatatcaattggcttcctagggtttatcgtgtgagcacaccatatatttacagta

SEQ ID NO: 75620 - DNA, 120 bp, Homo sapiens
  misc_feature: 633 for SV(C|O) and mtDNA
taccacaaccaccaccccatcatactctttcacccacagcaccaatcctacctccatcgctaaccccactaaaacactcaccaagacctcaacccctgacccccatgcctcaggatactc

SEQ ID NO: 75621 - DNA, 120 bp, Homo sapiens
  misc_feature: 633 for SV(C|O) and mtDNA
gttgttacttttatttggagttgcaccaaaatttttggggcctaagaccaatggatagctgttatcctttaaaagttgagaaagccatgttgttagacatgggggcatgagttagcagtt

SEQ ID NO: 75622 - DNA, 120 bp, Homo sapiens
  misc_feature: 633 for SV(C|O) and mtDNA
gttcactggataagtggcgttggcttgccatgattgtgaggggtaggagtcaggtagttagtattaggaggggggttgttagggggtcggaggaaaaggttggggaacagctaaataggt

SEQ ID NO: 75623 - DNA, 120 bp, Homo sapiens
  misc_feature: 633 for SV(C|O) and mtDNA
aagcgccaccctagcaatatcaaccattaaccttccctctacacttatcatcttcacaattctaattctactgactatcctagaaatcgctgtcgccttaatccaagcctacgttttcac

SEQ ID NO: 75624 - DNA, 120 bp, Homo sapiens; identical to SEQ ID NO: 57764
  misc_feature: 633 for SV(C|O) and mtDNA

SEQ ID NO: 75625 - DNA, 120 bp, Homo sapiens; identical to SEQ ID NO: 56254
  misc_feature: 633 for SV(C|O) and mtDNA

SEQ ID NO: 75626 - DNA, 120 bp, Homo sapiens; identical to SEQ ID NO: 58994
  misc_feature: 633 for SV(C|O) and mtDNA

SEQ ID NO: 75627 - DNA, 120 bp, Homo sapiens; identical to SEQ ID NO: 54291
  misc_feature: 633 for SV(C|O) and mtDNA

SEQ ID NO: 75628 - DNA, 120 bp, Homo sapiens
  misc_feature: 633 for SV(C|O) and mtDNA
gcttgtaggagggtaaaatagagacccagtaaaattgtaataagcagtgcttgaattatttggtttcggttgttttctattagactatggtgagctcaggtgattgatactcctgatgcg

SEQ ID NO: 75629 - DNA, 120 bp, Homo sapiens; identical to SEQ ID NO: 59767
  misc_feature: 633 for SV(C|O) and mtDNA

SEQ ID NO: 75630 - DNA, 120 bp, Homo sapiens; identical to SEQ ID NO: 56875
  misc_feature: 633 for SV(C|O) and mtDNA

SEQ ID NO: 75631 - DNA, 120 bp, Homo sapiens
  misc_feature: 633 for SV(C|O) and mtDNA
atagttgtagcaggaatcttcttactcatccgcttccaccccctagcagaaaatagcccactaatccaaactctaacactatgcttaggcgctatcaccactctgttcgcagcagtctgc

SEQ ID NO: 75632 - DNA, 120 bp, Homo sapiens
  misc_feature: 633 for SV(C|O) and mtDNA
gattaaaaatgccctagcccacttcttaccacaaggcacacctacaccccttatccccatactagttattatcgaaaccatcagcctactcattcaaccaatagccctggccgtacgcct

SEQ ID NO: 75633 - DNA, 120 bp, Homo sapiens
  misc_feature: 633 for SV(C|O) and mtDNA
ctaaccctgacttccctaattccccccatccttaccaccctcgttaaccctaacaaaaaaaactcatacccccattatgtaaaatccattgtcgcatccacctttattatcagtctcttc

SEQ ID NO: 75634 - DNA, 120 bp, Homo sapiens
  misc_feature: 633 for SV(C|O) and mtDNA
agatatagtaccgcaagggaaagatgaaaaattataaccaagcataatacagcaaggactaacccctataccttctgcataatgaattaactagaaataactttgcaaggagagccaaag

SEQ ID NO: 75635 - DNA, 120 bp, Homo sapiens; identical to SEQ ID NO: 60245
  misc_feature: 633 for SV(C|O) and mtDNA

SEQ ID NO: 75636 - DNA, 120 bp, Homo sapiens; identical to SEQ ID NO: 61501
  misc_feature: 633 for SV(C|O) and mtDNA

SEQ ID NO: 75637 - DNA, 120 bp, Homo sapiens; identical to SEQ ID NO: 61633
  misc_feature: 633 for SV(C|O) and mtDNA

SEQ ID NO: 75638 - DNA, 120 bp, Homo sapiens
  misc_feature: 633 for SV(C|O) and mtDNA
aggcggcggcttcgaagccaaagtgatgtttggatgtaaagtgaaatattagttggcggatgaagcagatagtgaggaaagttgagccaataatgacgtgaagtccgtggaagcctgtgg

SEQ ID NO: 75639 - DNA, 120 bp, Homo sapiens
  misc_feature: 633 for SV(C|O) and mtDNA
aattaagtattgcaacttactgagggctttgaaggctcttggtctgtatttaacctaaatttctataagattattagtataaaaggggagataggtaggagtagcgtggtaagggcgatg

SEQ ID NO: 75640 - DNA, 120 bp, Homo sapiens
  misc_feature: 633 for SV(C|O) and mtDNA
acttaaaataaaatccccactatgcacattttatttctccaacatactcggattctaccctaccatcacacaccgcacaatcccctatctaggccttcttacgagccaaaacctgcccct

SEQ ID NO: 75641 - DNA, 120 bp, Homo sapiens; identical to SEQ ID NO: 57320
  misc_feature: 633 for SV(C|O) and mtDNA

SEQ ID NO: 75642 - DNA, 120 bp, Homo sapiens
  misc_feature: 632 for SV(C|O) and mtDNA
attaagggtgttagtcatgttagcttgtttcaggtgcgagatagtagtagggtcgtggtgctggagtttaagttgagtagtaggaatgcggtagtagttaggataatataaatagttaaa

SEQ ID NO: 75643 - DNA, 120 bp, Homo sapiens
  misc_feature: 632 for SV(C|O) and mtDNA
ccagtatcaggcggcggcttcgaagccaaagtgatgtttggatgtaaagtgaaatattagttggcggatgaagcagatagtgaggaaagttgagccaataatgacgtgaagtccgtggaa

SEQ ID NO: 75644 - DNA, 120 bp, Homo sapiens; identical to SEQ ID NO: 61104
  misc_feature: 632 for SV(C|O) and mtDNA

SEQ ID NO: 75645 - DNA, 120 bp, Homo sapiens
  misc_feature: 632 for SV(C|O) and mtDNA
ttacacttaggagatttcaacttaacttgaccgctctgagctaaacctagccccaaacccactccaccttactaccagacaaccttagccaaaccatttacccaaataaagtataggcga

SEQ ID NO: 75646 - DNA, 120 bp, Homo sapiens
  misc_feature: 632 for SV(C|O) and mtDNA
ggctacattttctaccccagaaaactacgatagcccttatgaaacttaagggtcgaaggtggatttagcagtaaactgagagtagagtgcttagttgaacagggccctgaagcgcgtaca

SEQ ID NO: 75647 - DNA, 120 bp, Homo sapiens
  misc_feature: 632 for SV(C|O) and mtDNA
tggaattaagggtgttagtcatgttagcttgtttcaggtgcgagatagtagtagggtcgtggtgctggagtttaagttgagtagtaggaatgcggtagtagttaggataatataaatagt

SEQ ID NO: 75648 - DNA, 120 bp, Homo sapiens
  misc_feature: 632 for SV(C|O) and mtDNA
tgatgtgggcgattgatgaaaaggcggttgaggcgtctggtgagtagtgcatggctaggaatagtcctgtggtgatttggaggatcaggcaggcgccaaggagtgagccgaagtttcatc

SEQ ID NO: 75649 - DNA, 120 bp, Homo sapiens
  misc_feature: 632 for SV(C|O) and mtDNA
ccttgacctaacgtctttacgtgggtacttgcgcttactttgtagccttcatcagggtttgctgaagatggcggtatataggctgagcaagaggtggtgaggttgatcggggtttatcga

SEQ ID NO: 75650 - DNA, 120 bp, Homo sapiens
  misc_feature: 632 for SV(C|O) and mtDNA
tccaccccctagcagaaaatagcccactaatccaaactctaacactatgcttaggcgctatcaccactctgttcgcagcagtctgcgcccttacacaaaatgacatcaaaaaaatcgtag

SEQ ID NO: 75651 - DNA, 120 bp, Homo sapiens
  misc_feature: 632 for SV(C|O) and mtDNA
gcaggagtaggagagagggaggtaagagtcagaagcttatgttgtttatgcggggaaacgccatatcgggggcaccgattattaggggaactagtcagttgccaaagcctccgattatga

SEQ ID NO: 75652 - DNA, 120 bp, Homo sapiens
  misc_feature: 632 for SV(C|O) and mtDNA
tcacccactaggataccaacaaacctactcacccttaacagcacatagtacataaagccatttaccgtacatagcacattacagtcaaatcccttctcgtccccatggatgacccccctc

SEQ ID NO: 75653 - DNA, 120 bp, Homo sapiens
  misc_feature: 632 for SV(C|O) and mtDNA
tagttgtagcaggaatcttcttactcatccgcttccaccccctagcagaaaatagcccactaatccaaactctaacactatgcttaggcgctatcaccactctgttcgcagcagtctgcg

SEQ ID NO: 75654 - DNA, 120 bp, Homo sapiens
  misc_feature: 632 for SV(C|O) and mtDNA
ccatccctgagaatccaaaattctccgtgccacctatcacaccccatcctaaagtaaggtcagctaaataagctatcgggcccataccccgaaaatgttggttatacccttcccgtacta

SEQ ID NO: 75655 - DNA, 120 bp, Homo sapiens
  misc_feature: 632 for SV(C|O) and mtDNA
gtaggagggtaaaatagagacccagtaaaattgtaataagcagtgcttgaattatttggtttcggttgttttctattagactatggtgagctcaggtgattgatactcctgatgcgagta

SEQ ID NO: 75656 - DNA, 120 bp, Homo sapiens; identical to SEQ ID NO: 61782
  misc_feature: 632 for SV(C|O) and mtDNA

SEQ ID NO: 75657 - DNA, 120 bp, Homo sapiens
  misc_feature: 632 for SV(C|O) and mtDNA
ggtcggaggaaaaggttggggaacagctaaataggttgttgttgatttggttaaaaaatagtagagggatgatgctaataattaggctgtgggtggttgtgttgattcaaattatgtgtt

SEQ ID NO: 75658 - DNA, 120 bp, Homo sapiens; identical to SEQ ID NO: 58780
  misc_feature: 632 for SV(C|O) and mtDNA

SEQ ID NO: 75659 - DNA, 120 bp, Homo sapiens; identical to SEQ ID NO: 59882
  misc_feature: 632 for SV(C|O) and mtDNA

SEQ ID NO: 75660 - DNA, 120 bp, Homo sapiens
  misc_feature: 632 for SV(C|O) and mtDNA
gggacgagaagggatttgactgtaatgtgctatgtacggtaaatggctttatgtactatgtgctgttaagggtgagtaggtttgttggtatcctagtgggtgaggggtggctttggagtt

SEQ ID NO: 75661 - DNA, 120 bp, Homo sapiens
  misc_feature: 632 for SV(C|O) and mtDNA
ggcggcggcttcgaagccaaagtgatgtttggatgtaaagtgaaatattagttggcggatgaagcagatagtgaggaaagttgagccaataatgacgtgaagtccgtggaagcctgtggc

SEQ ID NO: 75662 - DNA, 120 bp, Homo sapiens
  misc_feature: 632 for SV(C|O) and mtDNA
agattgtttgggctactgctcgcagtgcgccgatcagggcgtagtttgagtttgatgctcaccctgatcagaggattgagtaaacggctaggctagaggtggctagaataaataggaggc

SEQ ID NO: 75663 - DNA, 120 bp, Homo sapiens
  misc_feature: 632 for SV(C|O) and mtDNA
gcccataatcatacaaagcccccgcaccaataggatcctcccgaatcaaccctgacccctctccttcataaattattcagcttcctacactattaaagtttaccacaaccaccaccccat

SEQ ID NO: 75664 - DNA, 120 bp, Homo sapiens; identical to SEQ ID NO: 61284
  misc_feature: 632 for SV(C|O) and mtDNA

SEQ ID NO: 75665 - DNA, 120 bp, Homo sapiens; identical to SEQ ID NO: 58030
  misc_feature: 632 for SV(C|O) and mtDNA

SEQ ID NO: 75666 - DNA, 120 bp, Homo sapiens; identical to SEQ ID NO: 56327
  misc_feature: 632 for SV(C|O) and mtDNA

SEQ ID NO: 75667 - DNA, 120 bp, Homo sapiens
  misc_feature: 632 for SV(C|O) and mtDNA
ctgttcattatagctactctcataaccctcaacacccactccctcttagccaatattgtgcctattgccatactagtctttgccgcctgcgaagcagcggtgggcctagccctactagtc

SEQ ID NO: 75668 - DNA, 120 bp, Homo sapiens
  misc_feature: 632 for SV(C|O) and mtDNA
cttgtagagagagtaaaaaatttaacacccatagtaggcctaaaagcagccaccaattaagaaagcgttcaagctcaacacccactacctaaaaaatcccaaacatataactgaactcct

SEQ ID NO: 75669 - DNA, 120 bp, Homo sapiens; identical to SEQ ID NO: 59618
  misc_feature: 632 for SV(C|O) and mtDNA

SEQ ID NO: 75670 - DNA, 120 bp, Homo sapiens; identical to SEQ ID NO: 56925
  misc_feature: 632 for SV(C|O) and mtDNA

SEQ ID NO: 75671 - DNA, 120 bp, Homo sapiens
  misc_feature: 632 for SV(C|O) and mtDNA
ctacctaagaacagctaaaagagcacacccgtctatgtagcaaaatagtgggaagatttataggtagaggcgacaaacctaccgagcctggtgatagctggttgtccaagatagaatctt

SEQ ID NO: 75672 - DNA, 120 bp, Homo sapiens
  misc_feature: 632 for SV(C|O) and mtDNA
cgtccctttctccataaaattcttcttagtagctattaccttcttattatttgatctagaaattgccctccttttacccctaccatgagccctacaaacaactaacctaccactaatagt

SEQ ID NO: 75673 - DNA, 120 bp, Homo sapiens; identical to SEQ ID NO: 62339
  misc_feature: 632 for SV(C|O) and mtDNA

SEQ ID NO: 75674 - DNA, 120 bp, Homo sapiens
  misc_feature: 632 for SV(C|O) and mtDNA
cctaaccctgacttccctaattccccccatccttaccaccctcgttaaccctaacaaaaaaaactcatacccccattatgtaaaatccattgtcgcatccacctttattatcagtctctt

SEQ ID NO: 75675 - DNA, 120 bp, Homo sapiens
  misc_feature: 632 for SV(C|O) and mtDNA
caagggacccctatctgaggggggtcatccatggggacgagaagggatttgactgtaatgtgctatgtacggtaaatggctttatgtactatgtgctgttaagggtgagtaggtttgttg

SEQ ID NO: 75676 - DNA, 120 bp, Homo sapiens; identical to SEQ ID NO: 53328
  misc_feature: 632 for SV(C|O) and mtDNA

SEQ ID NO: 75677 - DNA, 120 bp, Homo sapiens
  misc_feature: 632 for SV(C|O) and mtDNA
atgaagcgaacagattttcgttcattttggttctcagggtttgttataattttttatttttatgggctttggtgagggaggtaggtggtagtttgtgtttaatatttttagttgggtgat

SEQ ID NO: 75678 - DNA, 120 bp, Homo sapiens
  misc_feature: 632 for SV(C|O) and mtDNA
aaattaagtattgcaacttactgagggctttgaaggctcttggtctgtatttaacctaaatttctataagattattagtataaaaggggagataggtaggagtagcgtggtaagggcgat

SEQ ID NO: 75679 - DNA, 120 bp, Homo sapiens
  misc_feature: 631 for SV(C|O) and mtDNA
ttgtttgggctactgctcgcagtgcgccgatcagggcgtagtttgagtttgatgctcaccctgatcagaggattgagtaaacggctaggctagaggtggctagaataaataggaggccta

SEQ ID NO: 75680 - DNA, 120 bp, Homo sapiens
  misc_feature: 631 for SV(C|O) and mtDNA
tgacttccctaattccccccatccttaccaccctcgttaaccctaacaaaaaaaactcatacccccattatgtaaaatccattgtcgcatccacctttattatcagtctcttccccacaa

SEQ ID NO: 75681 - DNA, 120 bp, Homo sapiens; identical to SEQ ID NO: 56185
  misc_feature: 631 for SV(C|O) and mtDNA

SEQ ID NO: 75682 - DNA, 120 bp, Homo sapiens; identical to SEQ ID NO: 52177
  misc_feature: 631 for SV(C|O) and mtDNA

SEQ ID NO: 75683 - DNA, 120 bp, Homo sapiens
  misc_feature: 631 for SV(C|O) and mtDNA
gatttcccctattctcaggctacaccctagaccaaacctacgccaaaatccatttcactatcatattcatcggcgtaaatctaactttcttcccacaacactttctcggcctatccggaa

SEQ ID NO: 75684 - DNA, 120 bp, Homo sapiens; identical to SEQ ID NO: 59212
  misc_feature: 631 for SV(C|O) and mtDNA

SEQ ID NO: 75685 - DNA, 120 bp, Homo sapiens; identical to SEQ ID NO: 61609
  misc_feature: 631 for SV(C|O) and mtDNA

SEQ ID NO: 75686 - DNA, 120 bp, Homo sapiens
  misc_feature: 631 for SV(C|O) and mtDNA
tgttcattatagctactctcataaccctcaacacccactccctcttagccaatattgtgcctattgccatactagtctttgccgcctgcgaagcagcggtgggcctagccctactagtct

SEQ ID NO: 75687 - DNA, 120 bp, Homo sapiens; identical to SEQ ID NO: 61944
  misc_feature: 631 for SV(C|O) and mtDNA

SEQ ID NO: 75688 - DNA, 120 bp, Homo sapiens; identical to SEQ ID NO: 58767
  misc_feature: 631 for SV(C|O) and mtDNA

SEQ ID NO: 75689 - DNA, 120 bp, Homo sapiens; identical to SEQ ID NO: 58883
  misc_feature: 631 for SV(C|O) and mtDNA

SEQ ID NO: 75690 - DNA, 120 bp, Homo sapiens
  misc_feature: 631 for SV(C|O) and mtDNA
tgggtggttgtgttgattcaaattatgtgttttttggaaagtcatgtcagtggtagtaatataattgttgggacgattagttttagcattggagtaggtttaggttatgtacgtagtcta

SEQ ID NO: 75691 - DNA, 120 bp, Homo sapiens
  misc_feature: 631 for SV(C|O) and mtDNA
atcagccacatagccctcgtagtaacagccattctcatccaaaccccctgaagcttcaccggcgcagtcattctcataatcgcccacggacttacatcctcattactattctgcctagca

SEQ ID NO: 75692 - DNA, 120 bp, Homo sapiens
  misc_feature: 631 for SV(C|O) and mtDNA
gatgtgggcgattgatgaaaaggcggttgaggcgtctggtgagtagtgcatggctaggaatagtcctgtggtgatttggaggatcaggcaggcgccaaggagtgagccgaagtttcatca

SEQ ID NO: 75693 - DNA, 120 bp, Homo sapiens
  misc_feature: 631 for SV(C|O) and mtDNA
tgatagccaaggtggggataagtgtggtttcgaagaagatataaaatatgattagttctgtggctgtgaatgttataattaaggagatttgtagggagattagtatagagaggtagagtt

SEQ ID NO: 75694 - DNA, 120 bp, Homo sapiens
  misc_feature: 631 for SV(C|O) and mtDNA
ctggcattgtattagcaaactcatcactagacatcgtactacacgacacgtactacgttgtagctcacttccactatgtcctatcaataggagctgtatttgccatcataggaggcttca

SEQ ID NO: 75695 - DNA, 120 bp, Homo sapiens
  misc_feature: 631 for SV(C|O) and mtDNA
tctacttcaaattcctccctgtacgaaaggacaagagaaataaggcctacttcacaaagcgccttcccccgtaaatgatatcatctcaacttagtattatacccacacccacccaagaac

SEQ ID NO: 75696 - DNA, 120 bp, Homo sapiens; identical to SEQ ID NO: 57136
  misc_feature: 631 for SV(C|O) and mtDNA

SEQ ID NO: 75697 - DNA, 120 bp, Homo sapiens; identical to SEQ ID NO: 53684
  misc_feature: 631 for SV(C|O) and mtDNA

SEQ ID NO: 75698 - DNA, 120 bp, Homo sapiens
  misc_feature: 631 for SV(C|O) and mtDNA
tcggaggaaaaggttggggaacagctaaataggttgttgttgatttggttaaaaaatagtagagggatgatgctaataattaggctgtgggtggttgtgttgattcaaattatgtgtttt

SEQ ID NO: 75699 - DNA, 120 bp, Homo sapiens
  misc_feature: 631 for SV(C|O) and mtDNA
gaaattaagtattgcaacttactgagggctttgaaggctcttggtctgtatttaacctaaatttctataagattattagtataaaaggggagataggtaggagtagcgtggtaagggcga

SEQ ID NO: 75700 - DNA, 120 bp, Homo sapiens
  misc_feature: 631 for SV(C|O) and mtDNA
atcctgcccgccatcatcctagtcctcatcgccctcccatccctgcgcatcctttacataacagacgaggtcaacgatccctcccttaccatcaaatcaattggccaccaatggtactga

SEQ ID NO: 75701 - DNA, 120 bp, Homo sapiens
  misc_feature: 631 for SV(C|O) and mtDNA
aaactaggaggcgtccttgccctattactatccatcctcatcctagcaataatccccatcctccatatatccaaacaacaaagcataatatttcgcccactaagccaatcactttattga

SEQ ID NO: 75702 - DNA, 120 bp, Homo sapiens
  misc_feature: 631 for SV(C|O) and mtDNA
tatgattgagatgggggctagtttttgtcatgtgagaagaagcaggccggatgtcagaggggtgccttgggtaacctctgggacccagaagtgaaagggggctattcctagttttattgc

SEQ ID NO: 75703 - DNA, 120 bp, Homo sapiens
  misc_feature: 631 for SV(C|O) and mtDNA
agtatcaatcacctgagctcaccatagtctaatagaaaacaaccgaaaccaaataattcaagcactgcttattacaattttactgggtctctattttaccctcctacaagcctcagagta

SEQ ID NO: 75704 - DNA, 120 bp, Homo sapiens
  misc_feature: 631 for SV(C|O) and mtDNA
aactatcctgcccgccatcatcctagtcctcatcgccctcccatccctgcgcatcctttacataacagacgaggtcaacgatccctcccttaccatcaaatcaattggccaccaatggta

SEQ ID NO: 75705 - DNA, 120 bp, Homo sapiens
  misc_feature: 631 for SV(C|O) and mtDNA
aaaagaaagatgaatcctagggctcagagcactgcagcagatcatttcatattgcttccgtggagtgtggcgagtcagctaaatactttgacgccggtggggatagcgatgattatggta

SEQ ID NO: 75706 - DNA, 120 bp, Homo sapiens
  misc_feature: 631 for SV(C|O) and mtDNA
gaattaagggtgttagtcatgttagcttgtttcaggtgcgagatagtagtagggtcgtggtgctggagtttaagttgagtagtaggaatgcggtagtagttaggataatataaatagtta

SEQ ID NO: 75707 - DNA, 120 bp, Homo sapiens; identical to SEQ ID NO: 53670
  misc_feature: 631 for SV(C|O) and mtDNA

SEQ ID NO: 75708 - DNA, 120 bp, Homo sapiens
  misc_feature: 631 for SV(C|O) and mtDNA
gtgggtggttgtgttgattcaaattatgtgttttttggaaagtcatgtcagtggtagtaatataattgttgggacgattagttttagcattggagtaggtttaggttatgtacgtagtct

SEQ ID NO: 75709 - DNA, 120 bp, Homo sapiens; identical to SEQ ID NO: 60270
  misc_feature: 631 for SV(C|O) and mtDNA

SEQ ID NO: 75710 - DNA, 120 bp, Homo sapiens
  misc_feature: 631 for SV(C|O) and mtDNA
gggctacattttctaccccagaaaactacgatagcccttatgaaacttaagggtcgaaggtggatttagcagtaaactgagagtagagtgcttagttgaacagggccctgaagcgcgtac

SEQ ID NO: 75711 - DNA, 120 bp, Homo sapiens
  misc_feature: 631 for SV(C|O) and mtDNA
ggggacgagaagggatttgactgtaatgtgctatgtacggtaaatggctttatgtactatgtgctgttaagggtgagtaggtttgttggtatcctagtgggtgaggggtggctttggagt

SEQ ID NO: 75712 - DNA, 120 bp, Homo sapiens
  misc_feature: 631 for SV(C|O) and mtDNA
aaccctactcctaatcacataacctattcccccgagcaatctcaattacaatatatacaccaacaaacaatgttcaaccagtaactactactaatcaacgcccataatcatacaaagccc

SEQ ID NO: 75713 - DNA, 120 bp, Homo sapiens
  misc_feature: 631 for SV(C|O) and mtDNA
acaacataagcttctgactcttacctccctctctcctactcctgctcgcatctgctatagtggaggccggagcaggaacaggttgaacagtctaccctcccttagcagggaactactccc

SEQ ID NO: 75714 - DNA, 120 bp, Homo sapiens
  misc_feature: 631 for SV(C|O) and mtDNA
gcctcttcctacacatcgggcgaggcctatattacggatcatttctctactcagaaacctgaaacatcggcattatcctcctgcttgcaactatagcaacagccttcataggctatgtcc

SEQ ID NO: 75715 - DNA, 120 bp, Homo sapiens
  misc_feature: 631 for SV(C|O) and mtDNA
gcgaggcctatattacggatcatttctctactcagaaacctgaaacatcggcattatcctcctgcttgcaactatagcaacagccttcataggctatgtcctcccgtgaggccaaatatc

SEQ ID NO: 75716 - DNA, 120 bp, Homo sapiens; identical to SEQ ID NO: 58070
  misc_feature: 631 for SV(C|O) and mtDNA

SEQ ID NO: 75717 - DNA, 120 bp, Homo sapiens
  misc_feature: 631 for SV(C|O) and mtDNA
ctaagaacagctaaaagagcacacccgtctatgtagcaaaatagtgggaagatttataggtagaggcgacaaacctaccgagcctggtgatagctggttgtccaagatagaatcttagtt

SEQ ID NO: 75718 - DNA, 120 bp, Homo sapiens
  misc_feature: 631 for SV(C|O) and mtDNA
cgaacccatccctgagaatccaaaattctccgtgccacctatcacaccccatcctaaagtaaggtcagctaaataagctatcgggcccataccccgaaaatgttggttatacccttcccg

SEQ ID NO: 75719 - DNA, 120 bp, Homo sapiens; identical to SEQ ID NO: 57795
  misc_feature: 631 for SV(C|O) and mtDNA

SEQ ID NO: 75720 - DNA, 120 bp, Homo sapiens
  misc_feature: 631 for SV(C|O) and mtDNA
aatcccagtttgggtcttagctattgtgtgttcagatatgttaaagccactttcgtagtctattttgtgtcagctggagttttttacaactcaggtgagttttagctttattggggaggg

SEQ ID NO: 75721 - DNA, 120 bp, Homo sapiens
  misc_feature: 631 for SV(C|O) and mtDNA
cccctatctgaggggggtcatccatggggacgagaagggatttgactgtaatgtgctatgtacggtaaatggctttatgtactatgtgctgttaagggtgagtaggtttgttggtatcct

SEQ ID NO: 75722 - DNA, 120 bp, Homo sapiens; identical to SEQ ID NO: 59179
  misc_feature: 631 for SV(C|O) and mtDNA

SEQ ID NO: 75723 - DNA, 120 bp, Homo sapiens
  misc_feature: 631 for SV(C|O) and mtDNA
attaacactattctcaccagacctcctaggcgacccagacaattataccctagccaaccccttaaacacccctccccacatcaagcccgaatgatatttcctattcgcctacacaattct

SEQ ID NO: 75724 - DNA, 120 bp, Homo sapiens
  misc_feature: 631 for SV(C|O) and mtDNA
atgtgggcgattgatgaaaaggcggttgaggcgtctggtgagtagtgcatggctaggaatagtcctgtggtgatttggaggatcaggcaggcgccaaggagtgagccgaagtttcatcat

SEQ ID NO: 75725 - DNA, 120 bp, Homo sapiens
  misc_feature: 631 for SV(C|O) and mtDNA
aggcctatattacggatcatttctctactcagaaacctgaaacatcggcattatcctcctgcttgcaactatagcaacagccttcataggctatgtcctcccgtgaggccaaatatcatt

SEQ ID NO: 75726 - DNA, 120 bp, Homo sapiens; identical to SEQ ID NO: 57189
  misc_feature: 631 for SV(C|O) and mtDNA

SEQ ID NO: 75727 - DNA, 120 bp, Homo sapiens; identical to SEQ ID NO: 54513
  misc_feature: 630 for SV(C|O) and mtDNA

SEQ ID NO: 75728 - DNA, 120 bp, Homo sapiens
  misc_feature: 630 for SV(C|O) and mtDNA
ttgacctaacgtctttacgtgggtacttgcgcttactttgtagccttcatcagggtttgctgaagatggcggtatataggctgagcaagaggtggtgaggttgatcggggtttatcgatt

SEQ ID NO: 75729 - DNA, 120 bp, Homo sapiens
  misc_feature: 630 for SV(C|O) and mtDNA
ttctaggcctactcaggtaaaaaatcagtgcgagcttagcgctgtgatgagtgtgcctgcaaagatggtagagtagatgacgggttgggccaggggattaattagtacgggaagggtata

SEQ ID NO: 75730 - DNA, 120 bp, Homo sapiens
  misc_feature: 630 for SV(C|O) and mtDNA
cgaacagattttcgttcattttggttctcagggtttgttataattttttatttttatgggctttggtgagggaggtaggtggtagtttgtgtttaatatttttagttgggtgatgaggaa

SEQ ID NO: 75731 - DNA, 120 bp, Homo sapiens; identical to SEQ ID NO: 52118
  misc_feature: 630 for SV(C|O) and mtDNA

SEQ ID NO: 75732 - DNA, 120 bp, Homo sapiens
  misc_feature: 630 for SV(C|O) and mtDNA
ttaagggtgttagtcatgttagcttgtttcaggtgcgagatagtagtagggtcgtggtgctggagtttaagttgagtagtaggaatgcggtagtagttaggataatataaatagttaaat

SEQ ID NO: 75733 - DNA, 120 bp, Homo sapiens; identical to SEQ ID NO: 60664
  misc_feature: 630 for SV(C|O) and mtDNA

SEQ ID NO: 75734 - DNA, 120 bp, Homo sapiens; identical to SEQ ID NO: 59164
  misc_feature: 630 for SV(C|O) and mtDNA

SEQ ID NO: 75735 - DNA, 120 bp, Homo sapiens
  misc_feature: 630 for SV(C|O) and mtDNA
tgaatgaagcgaacagattttcgttcattttggttctcagggtttgttataattttttatttttatgggctttggtgagggaggtaggtggtagtttgtgtttaatatttttagttgggt

SEQ ID NO: 75736 - DNA, 120 bp, Homo sapiens; identical to SEQ ID NO: 57661
  misc_feature: 630 for SV(C|O) and mtDNA

SEQ ID NO: 75737 - DNA, 120 bp, Homo sapiens
  misc_feature: 630 for SV(C|O) and mtDNA
tgaactatcctgcccgccatcatcctagtcctcatcgccctcccatccctgcgcatcctttacataacagacgaggtcaacgatccctcccttaccatcaaatcaattggccaccaatgg

SEQ ID NO: 75738 - DNA, 120 bp, Homo sapiens; identical to SEQ ID NO: 59281
  misc_feature: 630 for SV(C|O) and mtDNA

SEQ ID NO: 75739 - DNA, 120 bp, Homo sapiens; identical to SEQ ID NO: 53978
  misc_feature: 630 for SV(C|O) and mtDNA

SEQ ID NO: 75740 - DNA, 120 bp, Homo sapiens
  misc_feature: 630 for SV(C|O) and mtDNA
cccactaggataccaacaaacctactcacccttaacagcacatagtacataaagccatttaccgtacatagcacattacagtcaaatcccttctcgtccccatggatgacccccctcaga

SEQ ID NO: 75741 - DNA, 120 bp, Homo sapiens
  misc_feature: 630 for SV(C|O) and mtDNA
tcctaggcgacccagacaattataccctagccaaccccttaaacacccctccccacatcaagcccgaatgatatttcctattcgcctacacaattctccgatccgtccctaacaaactag

SEQ ID NO: 75742 - DNA, 120 bp, Homo sapiens
  misc_feature: 630 for SV(C|O) and mtDNA
tcaggtaaaaaatcagtgcgagcttagcgctgtgatgagtgtgcctgcaaagatggtagagtagatgacgggttgggccaggggattaattagtacgggaagggtataaccaacattttc

SEQ ID NO: 75743 - DNA, 120 bp, Homo sapiens; identical to SEQ ID NO: 60005
  misc_feature: 630 for SV(C|O) and mtDNA

SEQ ID NO: 75744 - DNA, 120 bp, Homo sapiens; identical to SEQ ID NO: 57445
  misc_feature: 630 for SV(C|O) and mtDNA

SEQ ID NO: 75745 - DNA, 120 bp, Homo sapiens; identical to SEQ ID NO: 61780
  misc_feature: 630 for SV(C|O) and mtDNA

SEQ ID NO: 75746 - DNA, 120 bp, Homo sapiens
  misc_feature: 630 for SV(C|O) and mtDNA
ggaggatcaggcaggcgccaaggagtgagccgaagtttcatcatgcggagatgttggatggggtggggaggtcgatgaatgagtggttaattaattttattagggggttaattttgcgta

SEQ ID NO: 75747 - DNA, 120 bp, Homo sapiens
  misc_feature: 630 for SV(C|O) and mtDNA
tacccccattatgtaaaatccattgtcgcatccacctttattatcagtctcttccccacaacaatattcatgtgcctagaccaagaagttattatctcgaactgacactgagccacaacc

SEQ ID NO: 75748 - DNA, 120 bp, Homo sapiens
  misc_feature: 630 for SV(C|O) and mtDNA
cgagcaggagtaggagagagggaggtaagagtcagaagcttatgttgtttatgcggggaaacgccatatcgggggcaccgattattaggggaactagtcagttgccaaagcctccgatta

SEQ ID NO: 75749 - DNA, 120 bp, Homo sapiens
  misc_feature: 630 for SV(C|O) and mtDNA
gttcattatagctactctcataaccctcaacacccactccctcttagccaatattgtgcctattgccatactagtctttgccgcctgcgaagcagcggtgggcctagccctactagtctc

SEQ ID NO: 75750 - DNA, 120 bp, Homo sapiens
  misc_feature: 630 for SV(C|O) and mtDNA
gtcggaggaaaaggttggggaacagctaaataggttgttgttgatttggttaaaaaatagtagagggatgatgctaataattaggctgtgggtggttgtgttgattcaaattatgtgttt

SEQ ID NO: 75751 - DNA, 120 bp, Homo sapiens
  misc_feature: 630 for SV(C|O) and mtDNA
gtaaggagtatgggggtaattatggtgggccatacggtagtatttagttggggcatttcactgtaaagaggtgttggttctcttaatctttaacttaaaaggttaatgctaagttagctt

SEQ ID NO: 75752 - DNA, 120 bp, Homo sapiens
  misc_feature: 630 for SV(C|O) and mtDNA
aacactatgcttaggcgctatcaccactctgttcgcagcagtctgcgcccttacacaaaatgacatcaaaaaaatcgtagccttctccacttcaagtcaactaggactcataatagttac

SEQ ID NO: 75753 - DNA, 120 bp, Homo sapiens
  misc_feature: 630 for SV(C|O) and mtDNA
cgcaagggaaagatgaaaaattataaccaagcataatacagcaaggactaacccctataccttctgcataatgaattaactagaaataactttgcaaggagagccaaagctaagaccccc

SEQ ID NO: 75754 - DNA, 120 bp, Homo sapiens
  misc_feature: 630 for SV(C|O) and mtDNA
cccctattctcaggctacaccctagaccaaacctacgccaaaatccatttcactatcatattcatcggcgtaaatctaactttcttcccacaacactttctcggcctatccggaatgccc

SEQ ID NO: 75755 - DNA, 120 bp, Homo sapiens; identical to SEQ ID NO: 54844
  misc_feature: 630 for SV(C|O) and mtDNA

SEQ ID NO: 75756 - DNA, 120 bp, Homo sapiens
  misc_feature: 630 for SV(C|O) and mtDNA
ggcttgtaggagggtaaaatagagacccagtaaaattgtaataagcagtgcttgaattatttggtttcggttgttttctattagactatggtgagctcaggtgattgatactcctgatgc

SEQ ID NO: 75757 - DNA, 120 bp, Homo sapiens; identical to SEQ ID NO: 59915
  misc_feature: 630 for SV(C|O) and mtDNA

SEQ ID NO: 75758 - DNA, 120 bp, Homo sapiens
  misc_feature: 630 for SV(C|O) and mtDNA
ggatcaggcaggcgccaaggagtgagccgaagtttcatcatgcggagatgttggatggggtggggaggtcgatgaatgagtggttaattaattttattagggggttaattttgcgtattg

SEQ ID NO: 75759 - DNA, 120 bp, Homo sapiens; identical to SEQ ID NO: 61534
  misc_feature: 630 for SV(C|O) and mtDNA

SEQ ID NO: 75760 - DNA, 120 bp, Homo sapiens
  misc_feature: 630 for SV(C|O) and mtDNA
gatatagtaccgcaagggaaagatgaaaaattataaccaagcataatacagcaaggactaacccctataccttctgcataatgaattaactagaaataactttgcaaggagagccaaagc

SEQ ID NO: 75761 - DNA, 120 bp, Homo sapiens; identical to SEQ ID NO: 57051
  misc_feature: 630 for SV(C|O) and mtDNA

SEQ ID NO: 75762 - DNA, 120 bp, Homo sapiens
  misc_feature: 630 for SV(C|O) and mtDNA
aatcagccacatagccctcgtagtaacagccattctcatccaaaccccctgaagcttcaccggcgcagtcattctcataatcgcccacggacttacatcctcattactattctgcctagc

SEQ ID NO: 75763 - DNA, 120 bp, Homo sapiens; identical to SEQ ID NO: 60275
  misc_feature: 630 for SV(C|O) and mtDNA

SEQ ID NO: 75764 - DNA, 120 bp, Homo sapiens; identical to SEQ ID NO: 57459
  misc_feature: 630 for SV(C|O) and mtDNA

SEQ ID NO: 75765 - DNA, 120 bp, Homo sapiens
  misc_feature: 630 for SV(C|O) and mtDNA
gacgagaagggatttgactgtaatgtgctatgtacggtaaatggctttatgtactatgtgctgttaagggtgagtaggtttgttggtatcctagtgggtgaggggtggctttggagttgc

SEQ ID NO: 75766 - DNA, 120 bp, Homo sapiens; identical to SEQ ID NO: 62087
  misc_feature: 630 for SV(C|O) and mtDNA

SEQ ID NO: 75767 - DNA, 120 bp, Homo sapiens; identical to SEQ ID NO: 61122
  misc_feature: 630 for SV(C|O) and mtDNA

SEQ ID NO: 75768 - DNA, 120 bp, Homo sapiens
  misc_feature: 630 for SV(C|O) and mtDNA
gatagccaaggtggggataagtgtggtttcgaagaagatataaaatatgattagttctgtggctgtgaatgttataattaaggagatttgtagggagattagtatagagaggtagagttt

SEQ ID NO: 75769 - DNA, 120 bp, Homo sapiens
  misc_feature: 630 for SV(C|O) and mtDNA
gaaaagaaagatgaatcctagggctcagagcactgcagcagatcatttcatattgcttccgtggagtgtggcgagtcagctaaatactttgacgccggtggggatagcgatgattatggt

SEQ ID NO: 75770 - DNA, 120 bp, Homo sapiens; identical to SEQ ID NO: 54912
  misc_feature: 630 for SV(C|O) and mtDNA

SEQ ID NO: 75771 - DNA, 120 bp, Homo sapiens
  misc_feature: 630 for SV(C|O) and mtDNA
cttgacctaacgtctttacgtgggtacttgcgcttactttgtagccttcatcagggtttgctgaagatggcggtatataggctgagcaagaggtggtgaggttgatcggggtttatcgat

SEQ ID NO: 75772 - DNA, 120 bp, Homo sapiens
  misc_feature: 630 for SV(C|O) and mtDNA
ctaatcccagtttgggtcttagctattgtgtgttcagatatgttaaagccactttcgtagtctattttgtgtcagctggagttttttacaactcaggtgagttttagctttattggggag

SEQ ID NO: 75773 - DNA, 120 bp, Homo sapiens
  misc_feature: 630 for SV(C|O) and mtDNA
ctatcctgcccgccatcatcctagtcctcatcgccctcccatccctgcgcatcctttacataacagacgaggtcaacgatccctcccttaccatcaaatcaattggccaccaatggtact

SEQ ID NO: 75774 - DNA, 120 bp, Homo sapiens
  misc_feature: 630 for SV(C|O) and mtDNA
ctatagttgtagcaggaatcttcttactcatccgcttccaccccctagcagaaaatagcccactaatccaaactctaacactatgcttaggcgctatcaccactctgttcgcagcagtct

SEQ ID NO: 75775 - DNA, 120 bp, Homo sapiens
  misc_feature: 630 for SV(C|O) and mtDNA
ccctaaccctgacttccctaattccccccatccttaccaccctcgttaaccctaacaaaaaaaactcatacccccattatgtaaaatccattgtcgcatccacctttattatcagtctct

SEQ ID NO: 75776 - DNA, 120 bp, Homo sapiens
  misc_feature: 630 for SV(C|O) and mtDNA
aacagcacatagtacataaagccatttaccgtacatagcacattacagtcaaatcccttctcgtccccatggatgacccccctcagataggggtcccttgaccaccatcctccgtgaaat

SEQ ID NO: 75777 - DNA, 120 bp, Homo sapiens
  misc_feature: 630 for SV(C|O) and mtDNA
atccatggggacgagaagggatttgactgtaatgtgctatgtacggtaaatggctttatgtactatgtgctgttaagggtgagtaggtttgttggtatcctagtgggtgaggggtggctt

SEQ ID NO: 75778 - DNA, 120 bp, Homo sapiens
  misc_feature: 630 for SV(C|O) and mtDNA
acaccttgacctaacgtctttacgtgggtacttgcgcttactttgtagccttcatcagggtttgctgaagatggcggtatataggctgagcaagaggtggtgaggttgatcggggtttat

SEQ ID NO: 75779 - DNA, 120 bp, Homo sapiens; identical to SEQ ID NO: 52691
  misc_feature: 630 for SV(C|O) and mtDNA

SEQ ID NO: 75780 - DNA, 120 bp, Homo sapiens
  misc_feature: 629 for SV(C|O) and mtDNA
tttagctgactcgccacactccacggaagcaatatgaaatgatctgctgcagtgctctgagccctaggattcatctttcttttcaccgtaggcggcctgactggcattgtattagcaaac

SEQ ID NO: 75781 - DNA, 120 bp, Homo sapiens
  misc_feature: 629 for SV(C|O) and mtDNA
ttgctcgggggaataggttatgtgattaggagtagggttaggatgagtgggaagaagaaagagaggaagtaaagtttaattatgcctttttgggttgaggtgatgatggaggtggagatt

SEQ ID NO: 75782 - DNA, 120 bp, Homo sapiens
  misc_feature: 629 for SV(C|O) and mtDNA
aaaaccttgtagagagagtaaaaaatttaacacccatagtaggcctaaaagcagccaccaattaagaaagcgttcaagctcaacacccactacctaaaaaatcccaaacatataactgaa

SEQ ID NO: 75783 - DNA, 120 bp, Homo sapiens
  misc_feature: 629 for SV(C|O) and mtDNA
ttcactggataagtggcgttggcttgccatgattgtgaggggtaggagtcaggtagttagtattaggaggggggttgttagggggtcggaggaaaaggttggggaacagctaaataggtt

SEQ ID NO: 75784 - DNA, 120 bp, Homo sapiens
  misc_feature: 629 for SV(C|O) and mtDNA
ttataccctagccaaccccttaaacacccctccccacatcaagcccgaatgatatttcctattcgcctacacaattctccgatccgtccctaacaaactaggaggcgtccttgccctatt

SEQ ID NO: 75785 - DNA, 120 bp, Homo sapiens
  misc_feature: 629 for SV(C|O) and mtDNA
cccgcgtccctttctccataaaattcttcttagtagctattaccttcttattatttgatctagaaattgccctccttttacccctaccatgagccctacaaacaactaacctaccactaa

SEQ ID NO: 75786 - DNA, 120 bp, Homo sapiens
  misc_feature: 629 for SV(C|O) and mtDNA
catccctgagaatccaaaattctccgtgccacctatcacaccccatcctaaagtaaggtcagctaaataagctatcgggcccataccccgaaaatgttggttatacccttcccgtactaa

SEQ ID NO: 75787 - DNA, 120 bp, Homo sapiens; identical to SEQ ID NO: 58880
  misc_feature: 629 for SV(C|O) and mtDNA

SEQ ID NO: 75788 - DNA, 120 bp, Homo sapiens; identical to SEQ ID NO: 59999
  misc_feature: 629 for SV(C|O) and mtDNA

SEQ ID NO: 75789 - DNA, 120 bp, Homo sapiens; identical to SEQ ID NO: 52285
  misc_feature: 629 for SV(C|O) and mtDNA

SEQ ID NO: 75790 - DNA, 120 bp, Homo sapiens
  misc_feature: 629 for SV(C|O) and mtDNA
taccatcacacaccgcacaatcccctatctaggccttcttacgagccaaaacctgcccctactcctcctagacctaacctgactagaaaagctattacctaaaacaatttcacagcacca

SEQ ID NO: 75791 - DNA, 120 bp, Homo sapiens
  misc_feature: 629 for SV(C|O) and mtDNA
tgctcgggggaataggttatgtgattaggagtagggttaggatgagtgggaagaagaaagagaggaagtaaagtttaattatgcctttttgggttgaggtgatgatggaggtggagattt

SEQ ID NO: 75792 - DNA, 120 bp, Homo sapiens
  misc_feature: 629 for SV(C|O) and mtDNA
tgccagtatcaggcggcggcttcgaagccaaagtgatgtttggatgtaaagtgaaatattagttggcggatgaagcagatagtgaggaaagttgagccaataatgacgtgaagtccgtgg

SEQ ID NO: 75793 - DNA, 120 bp, Homo sapiens
  misc_feature: 629 for SV(C|O) and mtDNA
ggataatcctatttattacctcagaagtttttttcttcgcaggatttttctgagccttttaccactccagcctagcccctaccccccaattaggagggcactggcccccaacaggcatca

SEQ ID NO: 75794 - DNA, 120 bp, Homo sapiens; identical to SEQ ID NO: 59515
  misc_feature: 629 for SV(C|O) and mtDNA

SEQ ID NO: 75795 - DNA, 120 bp, Homo sapiens
  misc_feature: 629 for SV(C|O) and mtDNA
ctatccctcaaccccgacatcattaccgggttttcctcttgtaaatatagtttaaccaaaacatcagattgtgaatctgacaacagaggcttacgaccccttatttaccgagaaagctca

SEQ ID NO: 75796 - DNA, 120 bp, Homo sapiens
  misc_feature: 629 for SV(C|O) and mtDNA
cattgtattagcaaactcatcactagacatcgtactacacgacacgtactacgttgtagctcacttccactatgtcctatcaataggagctgtatttgccatcataggaggcttcattca

SEQ ID NO: 75797 - DNA, 120 bp, Homo sapiens
  misc_feature: 629 for SV(C|O) and mtDNA
tctgagccctaggattcatctttcttttcaccgtaggcggcctgactggcattgtattagcaaactcatcactagacatcgtactacacgacacgtactacgttgtagctcacttccact

SEQ ID NO: 75798 - DNA, 120 bp, Homo sapiens
  misc_feature: 629 for SV(C|O) and mtDNA
gattgctcgggggaataggttatgtgattaggagtagggttaggatgagtgggaagaagaaagagaggaagtaaagtttaattatgcctttttgggttgaggtgatgatggaggtggaga

SEQ ID NO: 75799 - DNA, 120 bp, Homo sapiens; identical to SEQ ID NO: 54120
  misc_feature: 629 for SV(C|O) and mtDNA

SEQ ID NO: 75800 - DNA, 120 bp, Homo sapiens
  misc_feature: 629 for SV(C|O) and mtDNA
atccgtaatataggcctcgcccgatgtgtaggaagaggcagataaagaatattgaggcgccattggcgtgaaggtagcggatgattcagccataatttacgtctcgagtgatgtgggcga

SEQ ID NO: 75801 - DNA, 120 bp, Homo sapiens
  misc_feature: 629 for SV(C|O) and mtDNA
gcgaacagattttcgttcattttggttctcagggtttgttataattttttatttttatgggctttggtgagggaggtaggtggtagtttgtgtttaatatttttagttgggtgatgagga

SEQ ID NO: 75802 - DNA, 120 bp, Homo sapiens
  misc_feature: 629 for SV(C|O) and mtDNA
atgagattgtttgggctactgctcgcagtgcgccgatcagggcgtagtttgagtttgatgctcaccctgatcagaggattgagtaaacggctaggctagaggtggctagaataaatagga

SEQ ID NO: 75803 - DNA, 120 bp, Homo sapiens; identical to SEQ ID NO: 61351
  misc_feature: 629 for SV(C|O) and mtDNA

SEQ ID NO: 75804 - DNA, 120 bp, Homo sapiens; identical to SEQ ID NO: 59427
  misc_feature: 629 for SV(C|O) and mtDNA

SEQ ID NO: 75805 - DNA, 120 bp, Homo sapiens; identical to SEQ ID NO: 53260
  misc_feature: 629 for SV(C|O) and mtDNA

SEQ ID NO: 75806 - DNA, 120 bp, Homo sapiens; identical to SEQ ID NO: 61595
  misc_feature: 629 for SV(C|O) and mtDNA

SEQ ID NO: 75807 - DNA, 120 bp, Homo sapiens
  misc_feature: 629 for SV(C|O) and mtDNA
taggataccaacaaacctactcacccttaacagcacatagtacataaagccatttaccgtacatagcacattacagtcaaatcccttctcgtccccatggatgacccccctcagataggg

SEQ ID NO: 75808 - DNA, 120 bp, Homo sapiens
  misc_feature: 629 for SV(C|O) and mtDNA
tacttcaaattcctccctgtacgaaaggacaagagaaataaggcctacttcacaaagcgccttcccccgtaaatgatatcatctcaacttagtattatacccacacccacccaagaacag

SEQ ID NO: 75809 - DNA, 120 bp, Homo sapiens
  misc_feature: 629 for SV(C|O) and mtDNA
aaaagccggttagcgggggcaggcctcctagggagaggagggtggatggaattaagggtgttagtcatgttagcttgtttcaggtgcgagatagtagtagggtcgtggtgctggagttta

SEQ ID NO: 75810 - DNA, 120 bp, Homo sapiens
  misc_feature: 629 for SV(C|O) and mtDNA
gccataacccaataccaaacgcccctcttcgtctgatccgtcctaatcacagcagtcctacttctcctatctctcccagtcctagctgctggcatcactatactactaacagaccgcaac

SEQ ID NO: 75811 - DNA, 120 bp, Homo sapiens
  misc_feature: 629 for SV(C|O) and mtDNA
gttagtcatgttagcttgtttcaggtgcgagatagtagtagggtcgtggtgctggagtttaagttgagtagtaggaatgcggtagtagttaggataatataaatagttaaattaagaatg

SEQ ID NO: 75812 - DNA, 120 bp, Homo sapiens
  misc_feature: 629 for SV(C|O) and mtDNA
caccatcaccctccttaacctctacttctacctacgcctaatctactccacctcaatcacactactccccatatctaacaacgtaaaaataaaatgacagtttgaacatacaaaacccac

SEQ ID NO: 75813 - DNA, 120 bp, Homo sapiens
  misc_feature: 629 for SV(C|O) and mtDNA
gtgatgtgggcgattgatgaaaaggcggttgaggcgtctggtgagtagtgcatggctaggaatagtcctgtggtgatttggaggatcaggcaggcgccaaggagtgagccgaagtttcat

SEQ ID NO: 75814 - DNA, 120 bp, Homo sapiens
  misc_feature: 629 for SV(C|O) and mtDNA
gataatcctatttattacctcagaagtttttttcttcgcaggatttttctgagccttttaccactccagcctagcccctaccccccaattaggagggcactggcccccaacaggcatcac

SEQ ID NO: 75815 - DNA, 120 bp, Homo sapiens
  misc_feature: 629 for SV(C|O) and mtDNA
aactaggaggcgtccttgccctattactatccatcctcatcctagcaataatccccatcctccatatatccaaacaacaaagcataatatttcgcccactaagccaatcactttattgac

SEQ ID NO: 75816 - DNA, 120 bp, Homo sapiens
  misc_feature: 629 for SV(C|O) and mtDNA
ggggtcggaggaaaaggttggggaacagctaaataggttgttgttgatttggttaaaaaatagtagagggatgatgctaataattaggctgtgggtggttgtgttgattcaaattatgtg

SEQ ID NO: 75817 - DNA, 120 bp, Homo sapiens
  misc_feature: 629 for SV(C|O) and mtDNA
aacaacataagcttctgactcttacctccctctctcctactcctgctcgcatctgctatagtggaggccggagcaggaacaggttgaacagtctaccctcccttagcagggaactactcc

SEQ ID NO: 75818 - DNA, 120 bp, Homo sapiens; identical to SEQ ID NO: 56446
  misc_feature: 629 for SV(C|O) and mtDNA

SEQ ID NO: 75819 - DNA, 120 bp, Homo sapiens
  misc_feature: 629 for SV(C|O) and mtDNA
ggacgagaagggatttgactgtaatgtgctatgtacggtaaatggctttatgtactatgtgctgttaagggtgagtaggtttgttggtatcctagtgggtgaggggtggctttggagttg

SEQ ID NO: 75820 - DNA, 120 bp, Homo sapiens
  misc_feature: 629 for SV(C|O) and mtDNA
ccctaggattcatctttcttttcaccgtaggcggcctgactggcattgtattagcaaactcatcactagacatcgtactacacgacacgtactacgttgtagctcacttccactatgtcc

SEQ ID NO: 75821 - DNA, 120 bp, Homo sapiens; identical to SEQ ID NO: 58781
  misc_feature: 629 for SV(C|O) and mtDNA

SEQ ID NO: 75822 - DNA, 120 bp, Homo sapiens
  misc_feature: 629 for SV(C|O) and mtDNA
ccaccccctagcagaaaatagcccactaatccaaactctaacactatgcttaggcgctatcaccactctgttcgcagcagtctgcgcccttacacaaaatgacatcaaaaaaatcgtagc

SEQ ID NO: 75823 - DNA, 120 bp, Homo sapiens
  misc_feature: 629 for SV(C|O) and mtDNA
ctactcctaatcacataacctattcccccgagcaatctcaattacaatatatacaccaacaaacaatgttcaaccagtaactactactaatcaacgcccataatcatacaaagcccccgc

SEQ ID NO: 75824 - DNA, 120 bp, Homo sapiens
  misc_feature: 629 for SV(C|O) and mtDNA
gcggcctgactggcattgtattagcaaactcatcactagacatcgtactacacgacacgtactacgttgtagctcacttccactatgtcctatcaataggagctgtatttgccatcatag

SEQ ID NO: 75825 - DNA, 120 bp, Homo sapiens
  misc_feature: 629 for SV(C|O) and mtDNA
gccctaggattcatctttcttttcaccgtaggcggcctgactggcattgtattagcaaactcatcactagacatcgtactacacgacacgtactacgttgtagctcacttccactatgtc

SEQ ID NO: 75826 - DNA, 120 bp, Homo sapiens
  misc_feature: 629 for SV(C|O) and mtDNA
gagtatcaatcacctgagctcaccatagtctaatagaaaacaaccgaaaccaaataattcaagcactgcttattacaattttactgggtctctattttaccctcctacaagcctcagagt

SEQ ID NO: 75827 - DNA, 120 bp, Homo sapiens
  misc_feature: 629 for SV(C|O) and mtDNA
gaggcttgtaggagggtaaaatagagacccagtaaaattgtaataagcagtgcttgaattatttggtttcggttgttttctattagactatggtgagctcaggtgattgatactcctgat

SEQ ID NO: 75828 - DNA, 120 bp, Homo sapiens; identical to SEQ ID NO: 61286
  misc_feature: 629 for SV(C|O) and mtDNA

SEQ ID NO: 75829 - DNA, 120 bp, Homo sapiens; identical to SEQ ID NO: 62321
  misc_feature: 629 for SV(C|O) and mtDNA

SEQ ID NO: 75830 - DNA, 120 bp, Homo sapiens
  misc_feature: 629 for SV(C|O) and mtDNA
agcgaacagattttcgttcattttggttctcagggtttgttataattttttatttttatgggctttggtgagggaggtaggtggtagtttgtgtttaatatttttagttgggtgatgagg

SEQ ID NO: 75831 - DNA, 120 bp, Homo sapiens; identical to SEQ ID NO: 58605
  misc_feature: 629 for SV(C|O) and mtDNA

SEQ ID NO: 75832 - DNA, 120 bp, Homo sapiens
  misc_feature: 629 for SV(C|O) and mtDNA
atcaatcacctgagctcaccatagtctaatagaaaacaaccgaaaccaaataattcaagcactgcttattacaattttactgggtctctattttaccctcctacaagcctcagagtactt

SEQ ID NO: 75833 - DNA, 120 bp, Homo sapiens
  misc_feature: 629 for SV(C|O) and mtDNA
atatagtaccgcaagggaaagatgaaaaattataaccaagcataatacagcaaggactaacccctataccttctgcataatgaattaactagaaataactttgcaaggagagccaaagct

SEQ ID NO: 75834 - DNA, 120 bp, Homo sapiens
  misc_feature: 629 for SV(C|O) and mtDNA
accaccctaaccctgacttccctaattccccccatccttaccaccctcgttaaccctaacaaaaaaaactcatacccccattatgtaaaatccattgtcgcatccacctttattatcagt

SEQ ID NO: 75835 - DNA, 120 bp, Homo sapiens; identical to SEQ ID NO: 62914
  misc_feature: 628 for SV(C|O) and mtDNA

SEQ ID NO: 75836 - DNA, 120 bp, Homo sapiens
  misc_feature: 628 for SV(C|O) and mtDNA
tttaccacaaccaccaccccatcatactctttcacccacagcaccaatcctacctccatcgctaaccccactaaaacactcaccaagacctcaacccctgacccccatgcctcaggatac

SEQ ID NO: 75837 - DNA, 120 bp, Homo sapiens
  misc_feature: 628 for SV(C|O) and mtDNA
tgccataacccaataccaaacgcccctcttcgtctgatccgtcctaatcacagcagtcctacttctcctatctctcccagtcctagctgctggcatcactatactactaacagaccgcaa

SEQ ID NO: 75838 - DNA, 120 bp, Homo sapiens; identical to SEQ ID NO: 54546
  misc_feature: 628 for SV(C|O) and mtDNA

SEQ ID NO: 75839 - DNA, 120 bp, Homo sapiens
  misc_feature: 628 for SV(C|O) and mtDNA
tgtaaggagtatgggggtaattatggtgggccatacggtagtatttagttggggcatttcactgtaaagaggtgttggttctcttaatctttaacttaaaaggttaatgctaagttagct

SEQ ID NO: 75840 - DNA, 120 bp, Homo sapiens
  misc_feature: 628 for SV(C|O) and mtDNA
aataccaaacgcccctcttcgtctgatccgtcctaatcacagcagtcctacttctcctatctctcccagtcctagctgctggcatcactatactactaacagaccgcaacctcaacacca

SEQ ID NO: 75841 - DNA, 120 bp, Homo sapiens
  misc_feature: 628 for SV(C|O) and mtDNA
tggcattgtattagcaaactcatcactagacatcgtactacacgacacgtactacgttgtagctcacttccactatgtcctatcaataggagctgtatttgccatcataggaggcttcat

SEQ ID NO: 75842 - DNA, 120 bp, Homo sapiens; identical to SEQ ID NO: 57353
  misc_feature: 628 for SV(C|O) and mtDNA

SEQ ID NO: 75843 - DNA, 120 bp, Homo sapiens; identical to SEQ ID NO: 61649
  misc_feature: 628 for SV(C|O) and mtDNA

SEQ ID NO: 75844 - DNA, 120 bp, Homo sapiens
  misc_feature: 628 for SV(C|O) and mtDNA
ctacaccctagaccaaacctacgccaaaatccatttcactatcatattcatcggcgtaaatctaactttcttcccacaacactttctcggcctatccggaatgccccgacgttactcgga

SEQ ID NO: 75845 - DNA, 120 bp, Homo sapiens; identical to SEQ ID NO: 59347
  misc_feature: 628 for SV(C|O) and mtDNA

SEQ ID NO: 75846 - DNA, 120 bp, Homo sapiens; identical to SEQ ID NO: 61115
  misc_feature: 628 for SV(C|O) and mtDNA

SEQ ID NO: 75847 - DNA, 120 bp, Homo sapiens
  misc_feature: 628 for SV(C|O) and mtDNA
tacaccttgacctaacgtctttacgtgggtacttgcgcttactttgtagccttcatcagggtttgctgaagatggcggtatataggctgagcaagaggtggtgaggttgatcggggttta

SEQ ID NO: 75848 - DNA, 120 bp, Homo sapiens; identical to SEQ ID NO: 63110
  misc_feature: 628 for SV(C|O) and mtDNA

SEQ ID NO: 75849 - DNA, 120 bp, Homo sapiens
  misc_feature: 628 for SV(C|O) and mtDNA
ccccattctcctcctatccctcaaccccgacatcattaccgggttttcctcttgtaaatatagtttaaccaaaacatcagattgtgaatctgacaacagaggcttacgaccccttattta

SEQ ID NO: 75850 - DNA, 120 bp, Homo sapiens; identical to SEQ ID NO: 52574
  misc_feature: 628 for SV(C|O) and mtDNA

SEQ ID NO: 75851 - DNA, 120 bp, Homo sapiens
  misc_feature: 628 for SV(C|O) and mtDNA
acaaaacacatagcctaccccttccttgtactatccctatgaggcataattataacaagctccatctgcctacgacaaacagacctaaaatcgctcattgcatactcttcaatcagccac

SEQ ID NO: 75852 - DNA, 120 bp, Homo sapiens
  misc_feature: 628 for SV(C|O) and mtDNA
gtatatgattgagatgggggctagtttttgtcatgtgagaagaagcaggccggatgtcagaggggtgccttgggtaacctctgggacccagaagtgaaagggggctattcctagttttat

SEQ ID NO: 75853 - DNA, 120 bp, Homo sapiens
  misc_feature: 628 for SV(C|O) and mtDNA
gtagcgtcttgtagacctacttgcgctgcatgtgccattaagatatataggatttagcctataatttaactttgacaaagttatgaaatggtttttctaatacctttttgaaaaagtcat

SEQ ID NO: 75854 - DNA, 120 bp, Homo sapiens
  misc_feature: 628 for SV(C|O) and mtDNA
caataccaaacgcccctcttcgtctgatccgtcctaatcacagcagtcctacttctcctatctctcccagtcctagctgctggcatcactatactactaacagaccgcaacctcaacacc

SEQ ID NO: 75855 - DNA, 120 bp, Homo sapiens
  misc_feature: 628 for SV(C|O) and mtDNA
aaaagctattacctaaaacaatttcacagcaccaaatctccacctccatcatcacctcaacccaaaaaggcataattaaactttacttcctctctttcttcttcccactcatcctaaccc

SEQ ID NO: 75856 - DNA, 120 bp, Homo sapiens
  misc_feature: 628 for SV(C|O) and mtDNA
gggtcggaggaaaaggttggggaacagctaaataggttgttgttgatttggttaaaaaatagtagagggatgatgctaataattaggctgtgggtggttgtgttgattcaaattatgtgt

SEQ ID NO: 75857 - DNA, 120 bp, Homo sapiens
  misc_feature: 628 for SV(C|O) and mtDNA
ccctattctcaggctacaccctagaccaaacctacgccaaaatccatttcactatcatattcatcggcgtaaatctaactttcttcccacaacactttctcggcctatccggaatgcccc

SEQ ID NO: 75858 - DNA, 120 bp, Homo sapiens
  misc_feature: 628 for SV(C|O) and mtDNA
ggctgaatcatccgctaccttcacgccaatggcgcctcaatattctttatctgcctcttcctacacatcgggcgaggcctatattacggatcatttctctactcagaaacctgaaacatc

SEQ ID NO: 75859 - DNA, 120 bp, Homo sapiens
  misc_feature: 628 for SV(C|O) and mtDNA
caccccctagcagaaaatagcccactaatccaaactctaacactatgcttaggcgctatcaccactctgttcgcagcagtctgcgcccttacacaaaatgacatcaaaaaaatcgtagcc

SEQ ID NO: 75860 - DNA, 120 bp, Homo sapiens; identical to SEQ ID NO: 58926
  misc_feature: 628 for SV(C|O) and mtDNA

SEQ ID NO: 75861 - DNA, 120 bp, Homo sapiens
  misc_feature: 628 for SV(C|O) and mtDNA
ggaggatggtggtcaagggacccctatctgaggggggtcatccatggggacgagaagggatttgactgtaatgtgctatgtacggtaaatggctttatgtactatgtgctgttaagggtg

SEQ ID NO: 75862 - DNA, 120 bp, Homo sapiens
  misc_feature: 628 for SV(C|O) and mtDNA
acacatagcctaccccttccttgtactatccctatgaggcataattataacaagctccatctgcctacgacaaacagacctaaaatcgctcattgcatactcttcaatcagccacatagc

SEQ ID NO: 75863 - DNA, 120 bp, Homo sapiens
  misc_feature: 628 for SV(C|O) and mtDNA
gctacaccctagaccaaacctacgccaaaatccatttcactatcatattcatcggcgtaaatctaactttcttcccacaacactttctcggcctatccggaatgccccgacgttactcgg

SEQ ID NO: 75864 - DNA, 120 bp, Homo sapiens
  misc_feature: 628 for SV(C|O) and mtDNA
gctaatacaatgccagtcaggccgcctacggtgaaaagaaagatgaatcctagggctcagagcactgcagcagatcatttcatattgcttccgtggagtgtggcgagtcagctaaatact

SEQ ID NO: 75865 - DNA, 120 bp, Homo sapiens
  misc_feature: 628 for SV(C|O) and mtDNA
gcgtccctttctccataaaattcttcttagtagctattaccttcttattatttgatctagaaattgccctccttttacccctaccatgagccctacaaacaactaacctaccactaatag

SEQ ID NO: 75866 - DNA, 120 bp, Homo sapiens; identical to SEQ ID NO: 55098
  misc_feature: 628 for SV(C|O) and mtDNA

SEQ ID NO: 75867 - DNA, 120 bp, Homo sapiens
  misc_feature: 628 for SV(C|O) and mtDNA
gatttggtatatgattgagatgggggctagtttttgtcatgtgagaagaagcaggccggatgtcagaggggtgccttgggtaacctctgggacccagaagtgaaagggggctattcctag

SEQ ID NO: 75868 - DNA, 120 bp, Homo sapiens
  misc_feature: 628 for SV(C|O) and mtDNA
gaggcctatattacggatcatttctctactcagaaacctgaaacatcggcattatcctcctgcttgcaactatagcaacagccttcataggctatgtcctcccgtgaggccaaatatcat

SEQ ID NO: 75869 - DNA, 120 bp, Homo sapiens
  misc_feature: 628 for SV(C|O) and mtDNA
gaggatcaggcaggcgccaaggagtgagccgaagtttcatcatgcggagatgttggatggggtggggaggtcgatgaatgagtggttaattaattttattagggggttaattttgcgtat

SEQ ID NO: 75870 - DNA, 120 bp, Homo sapiens
  misc_feature: 628 for SV(C|O) and mtDNA
gagccctaggattcatctttcttttcaccgtaggcggcctgactggcattgtattagcaaactcatcactagacatcgtactacacgacacgtactacgttgtagctcacttccactatg

SEQ ID NO: 75871 - DNA, 120 bp, Homo sapiens; identical to SEQ ID NO: 57817
  misc_feature: 628 for SV(C|O) and mtDNA

SEQ ID NO: 75872 - DNA, 120 bp, Homo sapiens; identical to SEQ ID NO: 58118
  misc_feature: 628 for SV(C|O) and mtDNA

SEQ ID NO: 75873 - DNA, 120 bp, Homo sapiens; identical to SEQ ID NO: 61457
  misc_feature: 628 for SV(C|O) and mtDNA

SEQ ID NO: 75874 - DNA, 120 bp, Homo sapiens
  misc_feature: 628 for SV(C|O) and mtDNA
ctggcttcaatctacttctcccgccgccgggaaaaaaggcgggagaagccccggcaggtttgaagctgcttcttcgaatttgcaattcaatatgaaaatcacctcggagctggtaaaaag

SEQ ID NO: 75875 - DNA, 120 bp, Homo sapiens; identical to SEQ ID NO: 57850
  misc_feature: 628 for SV(C|O) and mtDNA

SEQ ID NO: 75876 - DNA, 120 bp, Homo sapiens
  misc_feature: 628 for SV(C|O) and mtDNA
ctgattgaagagtatgcaatgagcgattttaggtctgtttgtcgtaggcagatggagcttgttataattatgcctcatagggatagtacaaggaaggggtaggctatgtgttttgtcagg

SEQ ID NO: 75877 - DNA, 120 bp, Homo sapiens
  misc_feature: 628 for SV(C|O) and mtDNA
acccactaggataccaacaaacctactcacccttaacagcacatagtacataaagccatttaccgtacatagcacattacagtcaaatcccttctcgtccccatggatgacccccctcag

SEQ ID NO: 75878 - DNA, 120 bp, Homo sapiens
  misc_feature: 628 for SV(C|O) and mtDNA
aacacatagcctaccccttccttgtactatccctatgaggcataattataacaagctccatctgcctacgacaaacagacctaaaatcgctcattgcatactcttcaatcagccacatag

SEQ ID NO: 75879 - DNA, 120 bp, Homo sapiens
  misc_feature: 628 for SV(C|O) and mtDNA
actaggataccaacaaacctactcacccttaacagcacatagtacataaagccatttaccgtacatagcacattacagtcaaatcccttctcgtccccatggatgacccccctcagatag

SEQ ID NO: 75880 - DNA, 120 bp, Homo sapiens
  misc_feature: 628 for SV(C|O) and mtDNA
ctaggataccaacaaacctactcacccttaacagcacatagtacataaagccatttaccgtacatagcacattacagtcaaatcccttctcgtccccatggatgacccccctcagatagg

SEQ ID NO: 75881 - DNA, 120 bp, Homo sapiens; identical to SEQ ID NO: 55010
  misc_feature: 628 for SV(C|O) and mtDNA

SEQ ID NO: 75882 - DNA, 120 bp, Homo sapiens
  misc_feature: 628 for SV(C|O) and mtDNA
cattctcctcctatccctcaaccccgacatcattaccgggttttcctcttgtaaatatagtttaaccaaaacatcagattgtgaatctgacaacagaggcttacgaccccttatttaccg

SEQ ID NO: 75883 - DNA, 120 bp, Homo sapiens
  misc_feature: 628 for SV(C|O) and mtDNA
cccttaacagcacatagtacataaagccatttaccgtacatagcacattacagtcaaatcccttctcgtccccatggatgacccccctcagataggggtcccttgaccaccatcctccgt

SEQ ID NO: 75884 - DNA, 120 bp, Homo sapiens
  misc_feature: 628 for SV(C|O) and mtDNA
aatgaatgaagcgaacagattttcgttcattttggttctcagggtttgttataattttttatttttatgggctttggtgagggaggtaggtggtagtttgtgtttaatatttttagttgg

SEQ ID NO: 75885 - DNA, 120 bp, Homo sapiens; identical to SEQ ID NO: 58870
  misc_feature: 628 for SV(C|O) and mtDNA

SEQ ID NO: 75886 - DNA, 120 bp, Homo sapiens
  misc_feature: 628 for SV(C|O) and mtDNA
agctttggggggttcgattccttccttttttgtctagattttatgtatacgggttcttcgaatgtgtggtagggtggggggcatccatatagtcactccaggtttatggagggttcttct

SEQ ID NO: 75887 - DNA, 120 bp, Homo sapiens; identical to SEQ ID NO: 57393
  misc_feature: 628 for SV(C|O) and mtDNA

SEQ ID NO: 75888 - DNA, 120 bp, Homo sapiens
  misc_feature: 627 for SV(C|O) and mtDNA
agacctcctaggcgacccagacaattataccctagccaaccccttaaacacccctccccacatcaagcccgaatgatatttcctattcgcctacacaattctccgatccgtccctaacaa

SEQ ID NO: 75889 - DNA, 120 bp, Homo sapiens; identical to SEQ ID NO: 55528
  misc_feature: 627 for SV(C|O) and mtDNA

SEQ ID NO: 75890 - DNA, 120 bp, Homo sapiens
  misc_feature: 627 for SV(C|O) and mtDNA
ctcctcctatccctcaaccccgacatcattaccgggttttcctcttgtaaatatagtttaaccaaaacatcagattgtgaatctgacaacagaggcttacgaccccttatttaccgagaa

SEQ ID NO: 75891 - DNA, 120 bp, Homo sapiens; identical to SEQ ID NO: 54409
  misc_feature: 627 for SV(C|O) and mtDNA

SEQ ID NO: 75892 - DNA, 120 bp, Homo sapiens
  misc_feature: 627 for SV(C|O) and mtDNA
ttaccacaaccaccaccccatcatactctttcacccacagcaccaatcctacctccatcgctaaccccactaaaacactcaccaagacctcaacccctgacccccatgcctcaggatact

SEQ ID NO: 75893 - DNA, 120 bp, Homo sapiens
  misc_feature: 627 for SV(C|O) and mtDNA
tggtatatgattgagatgggggctagtttttgtcatgtgagaagaagcaggccggatgtcagaggggtgccttgggtaacctctgggacccagaagtgaaagggggctattcctagtttt

SEQ ID NO: 75894 - DNA, 120 bp, Homo sapiens; identical to SEQ ID NO: 59043
  misc_feature: 627 for SV(C|O) and mtDNA

SEQ ID NO: 75895 - DNA, 120 bp, Homo sapiens
  misc_feature: 627 for SV(C|O) and mtDNA
caacataagcttctgactcttacctccctctctcctactcctgctcgcatctgctatagtggaggccggagcaggaacaggttgaacagtctaccctcccttagcagggaactactccca

SEQ ID NO: 75896 - DNA, 120 bp, Homo sapiens; identical to SEQ ID NO: 54838
  misc_feature: 627 for SV(C|O) and mtDNA

SEQ ID NO: 75897 - DNA, 120 bp, Homo sapiens
  misc_feature: 627 for SV(C|O) and mtDNA
agctgactcgccacactccacggaagcaatatgaaatgatctgctgcagtgctctgagccctaggattcatctttcttttcaccgtaggcggcctgactggcattgtattagcaaactca

SEQ ID NO: 75898 - DNA, 120 bp, Homo sapiens
  misc_feature: 627 for SV(C|O) and mtDNA
tgactggcattgtattagcaaactcatcactagacatcgtactacacgacacgtactacgttgtagctcacttccactatgtcctatcaataggagctgtatttgccatcataggaggct

SEQ ID NO: 75899 - DNA, 120 bp, Homo sapiens
  misc_feature: 627 for SV(C|O) and mtDNA
agtgatgtgggcgattgatgaaaaggcggttgaggcgtctggtgagtagtgcatggctaggaatagtcctgtggtgatttggaggatcaggcaggcgccaaggagtgagccgaagtttca

SEQ ID NO: 75900 - DNA, 120 bp, Homo sapiens
  misc_feature: 627 for SV(C|O) and mtDNA
tcccagtttgggtcttagctattgtgtgttcagatatgttaaagccactttcgtagtctattttgtgtcagctggagttttttacaactcaggtgagttttagctttattggggaggggg

SEQ ID NO: 75901 - DNA, 120 bp, Homo sapiens
  misc_feature: 627 for SV(C|O) and mtDNA
tcacacaccgcacaatcccctatctaggccttcttacgagccaaaacctgcccctactcctcctagacctaacctgactagaaaagctattacctaaaacaatttcacagcaccaaatct

SEQ ID NO: 75902 - DNA, 120 bp, Homo sapiens; identical to SEQ ID NO: 52152
  misc_feature: 627 for SV(C|O) and mtDNA

SEQ ID NO: 75903 - DNA, 120 bp, Homo sapiens
  misc_feature: 627 for SV(C|O) and mtDNA
tatagtaccgcaagggaaagatgaaaaattataaccaagcataatacagcaaggactaacccctataccttctgcataatgaattaactagaaataactttgcaaggagagccaaagcta

SEQ ID NO: 75904 - DNA, 120 bp, Homo sapiens
  misc_feature: 627 for SV(C|O) and mtDNA
tataccctagccaaccccttaaacacccctccccacatcaagcccgaatgatatttcctattcgcctacacaattctccgatccgtccctaacaaactaggaggcgtccttgccctatta

SEQ ID NO: 75905 - DNA, 120 bp, Homo sapiens
  misc_feature: 627 for SV(C|O) and mtDNA
agccctcgtagtaacagccattctcatccaaaccccctgaagcttcaccggcgcagtcattctcataatcgcccacggacttacatcctcattactattctgcctagcaaactcaaacta

SEQ ID NO: 75906 - DNA, 120 bp, Homo sapiens
  misc_feature: 627 for SV(C|O) and mtDNA
taaggagtatgggggtaattatggtgggccatacggtagtatttagttggggcatttcactgtaaagaggtgttggttctcttaatctttaacttaaaaggttaatgctaagttagcttt

SEQ ID NO: 75907 - DNA, 120 bp, Homo sapiens; identical to SEQ ID NO: 58060
  misc_feature: 627 for SV(C|O) and mtDNA

SEQ ID NO: 75908 - DNA, 120 bp, Homo sapiens
  misc_feature: 627 for SV(C|O) and mtDNA
cgtaaattatggctgaatcatccgctaccttcacgccaatggcgcctcaatattctttatctgcctcttcctacacatcgggcgaggcctatattacggatcatttctctactcagaaac

SEQ ID NO: 75909 - DNA, 120 bp, Homo sapiens
  misc_feature: 627 for SV(C|O) and mtDNA
gtgtaaggagtatgggggtaattatggtgggccatacggtagtatttagttggggcatttcactgtaaagaggtgttggttctcttaatctttaacttaaaaggttaatgctaagttagc

SEQ ID NO: 75910 - DNA, 120 bp, Homo sapiens
  misc_feature: 627 for SV(C|O) and mtDNA
actcctaatcacataacctattcccccgagcaatctcaattacaatatatacaccaacaaacaatgttcaaccagtaactactactaatcaacgcccataatcatacaaagcccccgcac

SEQ ID NO: 75911 - DNA, 120 bp, Homo sapiens; identical to SEQ ID NO: 60071
  misc_feature: 627 for SV(C|O) and mtDNA

SEQ ID NO: 75912 - DNA, 120 bp, Homo sapiens
  misc_feature: 627 for SV(C|O) and mtDNA
gggggtcggaggaaaaggttggggaacagctaaataggttgttgttgatttggttaaaaaatagtagagggatgatgctaataattaggctgtgggtggttgtgttgattcaaattatgt

SEQ ID NO: 75913 - DNA, 120 bp, Homo sapiens; identical to SEQ ID NO: 61262
  misc_feature: 627 for SV(C|O) and mtDNA

SEQ ID NO: 75914 - DNA, 120 bp, Homo sapiens
  misc_feature: 627 for SV(C|O) and mtDNA
ggcttcaatctacttctcccgccgccgggaaaaaaggcgggagaagccccggcaggtttgaagctgcttcttcgaatttgcaattcaatatgaaaatcacctcggagctggtaaaaagag

SEQ ID NO: 75915 - DNA, 120 bp, Homo sapiens; identical to SEQ ID NO: 55893
  misc_feature: 627 for SV(C|O) and mtDNA

SEQ ID NO: 75916 - DNA, 120 bp, Homo sapiens
  misc_feature: 627 for SV(C|O) and mtDNA
ctcctatccctcaaccccgacatcattaccgggttttcctcttgtaaatatagtttaaccaaaacatcagattgtgaatctgacaacagaggcttacgaccccttatttaccgagaaagc

SEQ ID NO: 75917 - DNA, 120 bp, Homo sapiens; identical to SEQ ID NO: 61281
  misc_feature: 627 for SV(C|O) and mtDNA

SEQ ID NO: 75918 - DNA, 120 bp, Homo sapiens; identical to SEQ ID NO: 59242
  misc_feature: 627 for SV(C|O) and mtDNA

SEQ ID NO: 75919 - DNA, 120 bp, Homo sapiens
  misc_feature: 627 for SV(C|O) and mtDNA
gagtgatgtgggcgattgatgaaaaggcggttgaggcgtctggtgagtagtgcatggctaggaatagtcctgtggtgatttggaggatcaggcaggcgccaaggagtgagccgaagtttc

SEQ ID NO: 75920 - DNA, 120 bp, Homo sapiens
  misc_feature: 627 for SV(C|O) and mtDNA
actggcattgtattagcaaactcatcactagacatcgtactacacgacacgtactacgttgtagctcacttccactatgtcctatcaataggagctgtatttgccatcataggaggcttc

SEQ ID NO: 75921 - DNA, 120 bp, Homo sapiens
  misc_feature: 627 for SV(C|O) and mtDNA
cccatattgtaacttactactccggaaaaaaagaaccatttggatacataggtatggtctgagctatgatatcaattggcttcctagggtttatcgtgtgagcacaccatatatttacag

SEQ ID NO: 75922 - DNA, 120 bp, Homo sapiens; identical to SEQ ID NO: 55714
  misc_feature: 627 for SV(C|O) and mtDNA

SEQ ID NO: 75923 - DNA, 120 bp, Homo sapiens; identical to SEQ ID NO: 61443
  misc_feature: 627 for SV(C|O) and mtDNA

SEQ ID NO: 75924 - DNA, 120 bp, Homo sapiens
  misc_feature: 627 for SV(C|O) and mtDNA
aagatgaatcctagggctcagagcactgcagcagatcatttcatattgcttccgtggagtgtggcgagtcagctaaatactttgacgccggtggggatagcgatgattatggtagcggag

SEQ ID NO: 75925 - DNA, 120 bp, Homo sapiens; identical to SEQ ID NO: 58036
  misc_feature: 627 for SV(C|O) and mtDNA

SEQ ID NO: 75926 - DNA, 120 bp, Homo sapiens
  misc_feature: 627 for SV(C|O) and mtDNA
acttttcgcttcgaagcgaaggcttctcaaatcatgaaaattattaatattactgctgttagagaaatgaatgagcctacagatgataggatgtttcatgtggtgtatgcatcggggtag

SEQ ID NO: 75927 - DNA, 120 bp, Homo sapiens
  misc_feature: 627 for SV(C|O) and mtDNA
caggtaaaaaatcagtgcgagcttagcgctgtgatgagtgtgcctgcaaagatggtagagtagatgacgggttgggccaggggattaattagtacgggaagggtataaccaacattttcg

SEQ ID NO: 75928 - DNA, 120 bp, Homo sapiens
  misc_feature: 627 for SV(C|O) and mtDNA
ccttaacagcacatagtacataaagccatttaccgtacatagcacattacagtcaaatcccttctcgtccccatggatgacccccctcagataggggtcccttgaccaccatcctccgtg

SEQ ID NO: 75929 - DNA, 120 bp, Homo sapiens; identical to SEQ ID NO: 62141
  misc_feature: 627 for SV(C|O) and mtDNA

SEQ ID NO: 75930 - DNA, 120 bp, Homo sapiens
  misc_feature: 627 for SV(C|O) and mtDNA
caacaatccccctctacctaaaactcacagccctcgctgtcactttcctaggacttctaacagccctagacctcaactacctaaccaacaaacttaaaataaaatccccactatgcacat

SEQ ID NO: 75931 - DNA, 120 bp, Homo sapiens; identical to SEQ ID NO: 56556
  misc_feature: 627 for SV(C|O) and mtDNA

SEQ ID NO: 75932 - DNA, 120 bp, Homo sapiens
  misc_feature: 627 for SV(C|O) and mtDNA
atctgcctcttcctacacatcgggcgaggcctatattacggatcatttctctactcagaaacctgaaacatcggcattatcctcctgcttgcaactatagcaacagccttcataggctat

SEQ ID NO: 75933 - DNA, 120 bp, Homo sapiens
  misc_feature: 627 for SV(C|O) and mtDNA
aatatgctcgtgtgtctacgtctattcctactgtaaatatatggtgtgctcacacgataaaccctaggaagccaattgatatcatagctcagaccatacctatgtatccaaatggttctt

SEQ ID NO: 75934 - DNA, 120 bp, Homo sapiens
  misc_feature: 626 for SV(C|O) and mtDNA
actggcttcaatctacttctcccgccgccgggaaaaaaggcgggagaagccccggcaggtttgaagctgcttcttcgaatttgcaattcaatatgaaaatcacctcggagctggtaaaaa

SEQ ID NO: 75935 - DNA, 120 bp, Homo sapiens
  misc_feature: 626 for SV(C|O) and mtDNA
acgtaaattatggctgaatcatccgctaccttcacgccaatggcgcctcaatattctttatctgcctcttcctacacatcgggcgaggcctatattacggatcatttctctactcagaaa

SEQ ID NO: 75936 - DNA, 120 bp, Homo sapiens; identical to SEQ ID NO: 52546
  misc_feature: 626 for SV(C|O) and mtDNA

SEQ ID NO: 75937 - DNA, 120 bp, Homo sapiens
  misc_feature: 626 for SV(C|O) and mtDNA
ggcctactcaggtaaaaaatcagtgcgagcttagcgctgtgatgagtgtgcctgcaaagatggtagagtagatgacgggttgggccaggggattaattagtacgggaagggtataaccaa

SEQ ID NO: 75938 - DNA, 120 bp, Homo sapiens
  misc_feature: 626 for SV(C|O) and mtDNA
atagtaccgcaagggaaagatgaaaaattataaccaagcataatacagcaaggactaacccctataccttctgcataatgaattaactagaaataactttgcaaggagagccaaagctaa

SEQ ID NO: 75939 - DNA, 120 bp, Homo sapiens; identical to SEQ ID NO: 59451
  misc_feature: 626 for SV(C|O) and mtDNA

SEQ ID NO: 75940 - DNA, 120 bp, Homo sapiens; identical to SEQ ID NO: 57351
  misc_feature: 626 for SV(C|O) and mtDNA

SEQ ID NO: 75941 - DNA, 120 bp, Homo sapiens
  misc_feature: 626 for SV(C|O) and mtDNA
acactatgcttaggcgctatcaccactctgttcgcagcagtctgcgcccttacacaaaatgacatcaaaaaaatcgtagccttctccacttcaagtcaactaggactcataatagttaca

SEQ ID NO: 75942 - DNA, 120 bp, Homo sapiens; identical to SEQ ID NO: 56729
  misc_feature: 626 for SV(C|O) and mtDNA

SEQ ID NO: 75943 - DNA, 120 bp, Homo sapiens
  misc_feature: 626 for SV(C|O) and mtDNA
cgcccataatcatacaaagcccccgcaccaataggatcctcccgaatcaaccctgacccctctccttcataaattattcagcttcctacactattaaagtttaccacaaccaccacccca

SEQ ID NO: 75944 - DNA, 120 bp, Homo sapiens
  misc_feature: 626 for SV(C|O) and mtDNA
atggttgttacttttatttggagttgcaccaaaatttttggggcctaagaccaatggatagctgttatcctttaaaagttgagaaagccatgttgttagacatgggggcatgagttagca

SEQ ID NO: 75945 - DNA, 120 bp, Homo sapiens
  misc_feature: 626 for SV(C|O) and mtDNA
tgaaaagaaagatgaatcctagggctcagagcactgcagcagatcatttcatattgcttccgtggagtgtggcgagtcagctaaatactttgacgccggtggggatagcgatgattatgg

SEQ ID NO: 75946 - DNA, 120 bp, Homo sapiens
  misc_feature: 626 for SV(C|O) and mtDNA
gttgaggtgatgatggaggtggagatttggtgctgtgaaattgttttaggtaatagcttttctagtcaggttaggtctaggaggagtaggggcaggttttggctcgtaagaaggcctaga

SEQ ID NO: 75947 - DNA, 120 bp, Homo sapiens
  misc_feature: 626 for SV(C|O) and mtDNA
tctactccacctcaatcacactactccccatatctaacaacgtaaaaataaaatgacagtttgaacatacaaaacccaccccattcctccccacactcatcgcccttaccacgctactcc

SEQ ID NO: 75948 - DNA, 120 bp, Homo sapiens
  misc_feature: 626 for SV(C|O) and mtDNA
tattctcaggctacaccctagaccaaacctacgccaaaatccatttcactatcatattcatcggcgtaaatctaactttcttcccacaacactttctcggcctatccggaatgccccgac

SEQ ID NO: 75949 - DNA, 120 bp, Homo sapiens
  misc_feature: 626 for SV(C|O) and mtDNA
cgcgtccctttctccataaaattcttcttagtagctattaccttcttattatttgatctagaaattgccctccttttacccctaccatgagccctacaaacaactaacctaccactaata

SEQ ID NO: 75950 - DNA, 120 bp, Homo sapiens
  misc_feature: 626 for SV(C|O) and mtDNA
gcccgcgtccctttctccataaaattcttcttagtagctattaccttcttattatttgatctagaaattgccctccttttacccctaccatgagccctacaaacaactaacctaccacta

SEQ ID NO: 75951 - DNA, 120 bp, Homo sapiens
  misc_feature: 626 for SV(C|O) and mtDNA
tagcaataatccccatcctccatatatccaaacaacaaagcataatatttcgcccactaagccaatcactttattgactcctagccgcagacctcctcattctaacctgaatcggaggac

SEQ ID NO: 75952 - DNA, 120 bp, Homo sapiens
  misc_feature: 626 for SV(C|O) and mtDNA
taatcccagtttgggtcttagctattgtgtgttcagatatgttaaagccactttcgtagtctattttgtgtcagctggagttttttacaactcaggtgagttttagctttattggggagg

SEQ ID NO: 75953 - DNA, 120 bp, Homo sapiens; identical to SEQ ID NO: 59199
  misc_feature: 626 for SV(C|O) and mtDNA

SEQ ID NO: 75954 - DNA, 120 bp, Homo sapiens
  misc_feature: 626 for SV(C|O) and mtDNA
ctctcctacttacaggactcaacatactagtcacagccctatactccctctacatatttaccacaacacaatggggctcactcacccaccacattaacaacataaaaccctcattcacac

SEQ ID NO: 75955 - DNA, 120 bp, Homo sapiens
  misc_feature: 626 for SV(C|O) and mtDNA
aatcctatacaaccgtatcggcgatatcggtttcatcctcgccttagcatgatttatcctacactccaactcatgagacccacaacaaatagcccttctaaacgctaatccaagcctcac

SEQ ID NO: 75956 - DNA, 120 bp, Homo sapiens
  misc_feature: 626 for SV(C|O) and mtDNA
accatcaccctccttaacctctacttctacctacgcctaatctactccacctcaatcacactactccccatatctaacaacgtaaaaataaaatgacagtttgaacatacaaaacccacc

SEQ ID NO: 75957 - DNA, 120 bp, Homo sapiens
  misc_feature: 626 for SV(C|O) and mtDNA
ctaccatcacacaccgcacaatcccctatctaggccttcttacgagccaaaacctgcccctactcctcctagacctaacctgactagaaaagctattacctaaaacaatttcacagcacc

SEQ ID NO: 75958 - DNA, 120 bp, Homo sapiens
  misc_feature: 626 for SV(C|O) and mtDNA
ccgcaagggaaagatgaaaaattataaccaagcataatacagcaaggactaacccctataccttctgcataatgaattaactagaaataactttgcaaggagagccaaagctaagacccc

SEQ ID NO: 75959 - DNA, 120 bp, Homo sapiens
  misc_feature: 626 for SV(C|O) and mtDNA
ccctactcctaatcacataacctattcccccgagcaatctcaattacaatatatacaccaacaaacaatgttcaaccagtaactactactaatcaacgcccataatcatacaaagccccc

SEQ ID NO: 75960 - DNA, 120 bp, Homo sapiens; identical to SEQ ID NO: 60924
  misc_feature: 626 for SV(C|O) and mtDNA

SEQ ID NO: 75961 - DNA, 120 bp, Homo sapiens
  misc_feature: 626 for SV(C|O) and mtDNA
ggaattaagggtgttagtcatgttagcttgtttcaggtgcgagatagtagtagggtcgtggtgctggagtttaagttgagtagtaggaatgcggtagtagttaggataatataaatagtt

SEQ ID NO: 75962 - DNA, 120 bp, Homo sapiens
  misc_feature: 626 for SV(C|O) and mtDNA
cagaaattaagtattgcaacttactgagggctttgaaggctcttggtctgtatttaacctaaatttctataagattattagtataaaaggggagataggtaggagtagcgtggtaagggc

SEQ ID NO: 75963 - DNA, 120 bp, Homo sapiens; identical to SEQ ID NO: 58154
  misc_feature: 626 for SV(C|O) and mtDNA

SEQ ID NO: 75964 - DNA, 120 bp, Homo sapiens
  misc_feature: 626 for SV(C|O) and mtDNA
caccttgacctaacgtctttacgtgggtacttgcgcttactttgtagccttcatcagggtttgctgaagatggcggtatataggctgagcaagaggtggtgaggttgatcggggtttatc

SEQ ID NO: 75965 - DNA, 120 bp, Homo sapiens
  misc_feature: 626 for SV(C|O) and mtDNA
gaggtgatgatggaggtggagatttggtgctgtgaaattgttttaggtaatagcttttctagtcaggttaggtctaggaggagtaggggcaggttttggctcgtaagaaggcctagatag

SEQ ID NO: 75966 - DNA, 120 bp, Homo sapiens
  misc_feature: 626 for SV(C|O) and mtDNA
catgttacgacttgtctcctctatataaatgcgtaggggttttagttaaatgtcctttgaagtatacttgaggagggtgacgggcggtgtgtacgcgcttcagggccctgttcaactaag

SEQ ID NO: 75967 - DNA, 120 bp, Homo sapiens
  misc_feature: 626 for SV(C|O) and mtDNA
ctgcctcttcctacacatcgggcgaggcctatattacggatcatttctctactcagaaacctgaaacatcggcattatcctcctgcttgcaactatagcaacagccttcataggctatgt

SEQ ID NO: 75968 - DNA, 120 bp, Homo sapiens
  misc_feature: 626 for SV(C|O) and mtDNA
cccgatggtgcagccgctattaaaggttcgtttgttcaacgattaaagtcctacgtgatctgagttcagaccggagtaatccaggtcggtttctatctacttcaaattcctccctgtacg

SEQ ID NO: 75969 - DNA, 120 bp, Homo sapiens
  misc_feature: 626 for SV(C|O) and mtDNA
cctattctcaggctacaccctagaccaaacctacgccaaaatccatttcactatcatattcatcggcgtaaatctaactttcttcccacaacactttctcggcctatccggaatgccccg

SEQ ID NO: 75970 - DNA, 120 bp, Homo sapiens; identical to SEQ ID NO: 61355
  misc_feature: 626 for SV(C|O) and mtDNA

SEQ ID NO: 75971 - DNA, 120 bp, Homo sapiens
  misc_feature: 626 for SV(C|O) and mtDNA
cctaagaacagctaaaagagcacacccgtctatgtagcaaaatagtgggaagatttataggtagaggcgacaaacctaccgagcctggtgatagctggttgtccaagatagaatcttagt

SEQ ID NO: 75972 - DNA, 120 bp, Homo sapiens; identical to SEQ ID NO: 59076
  misc_feature: 626 for SV(C|O) and mtDNA

SEQ ID NO: 75973 - DNA, 120 bp, Homo sapiens
  misc_feature: 626 for SV(C|O) and mtDNA
cataacccaataccaaacgcccctcttcgtctgatccgtcctaatcacagcagtcctacttctcctatctctcccagtcctagctgctggcatcactatactactaacagaccgcaacct

SEQ ID NO: 75974 - DNA, 120 bp, Homo sapiens; identical to SEQ ID NO: 52765
  misc_feature: 626 for SV(C|O) and mtDNA

SEQ ID NO: 75975 - DNA, 120 bp, Homo sapiens; identical to SEQ ID NO: 59183
  misc_feature: 626 for SV(C|O) and mtDNA

SEQ ID NO: 75976 - DNA, 120 bp, Homo sapiens
  misc_feature: 625 for SV(C|O) and mtDNA
tcctcctatccctcaaccccgacatcattaccgggttttcctcttgtaaatatagtttaaccaaaacatcagattgtgaatctgacaacagaggcttacgaccccttatttaccgagaaa

SEQ ID NO: 75977 - DNA, 120 bp, Homo sapiens
  misc_feature: 625 for SV(C|O) and mtDNA
tcacctttcatgatcacgccctcataatcattttccttatctgcttcctagtcctgtatgcccttttcctaacactcacaacaaaactaactaatactaacatctcagacgctcaggaaa

SEQ ID NO: 75978 - DNA, 120 bp, Homo sapiens
  misc_feature: 625 for SV(C|O) and mtDNA
tttcaactacaagaacaccaatgaccccaatacgcaaaattaaccccctaataaaattaattaaccactcattcatcgacctccccaccccatccaacatctccgcatgatgaaacttcg

SEQ ID NO: 75979 - DNA, 120 bp, Homo sapiens; identical to SEQ ID NO: 62239
  misc_feature: 625 for SV(C|O) and mtDNA

SEQ ID NO: 75980 - DNA, 120 bp, Homo sapiens; identical to SEQ ID NO: 58974
  misc_feature: 625 for SV(C|O) and mtDNA

SEQ ID NO: 75981 - DNA, 120 bp, Homo sapiens; identical to SEQ ID NO: 61316
  misc_feature: 625 for SV(C|O) and mtDNA

SEQ ID NO: 75982 - DNA, 120 bp, Homo sapiens
  misc_feature: 625 for SV(C|O) and mtDNA
ttaacagcacatagtacataaagccatttaccgtacatagcacattacagtcaaatcccttctcgtccccatggatgacccccctcagataggggtcccttgaccaccatcctccgtgaa

SEQ ID NO: 75983 - DNA, 120 bp, Homo sapiens; identical to SEQ ID NO: 58202
  misc_feature: 625 for SV(C|O) and mtDNA

SEQ ID NO: 75984 - DNA, 120 bp, Homo sapiens
  misc_feature: 625 for SV(C|O) and mtDNA
ccctaccatcacacaccgcacaatcccctatctaggccttcttacgagccaaaacctgcccctactcctcctagacctaacctgactagaaaagctattacctaaaacaatttcacagca

SEQ ID NO: 75985 - DNA, 120 bp, Homo sapiens
  misc_feature: 625 for SV(C|O) and mtDNA
tgagattgctcgggggaataggttatgtgattaggagtagggttaggatgagtgggaagaagaaagagaggaagtaaagtttaattatgcctttttgggttgaggtgatgatggaggtgg

SEQ ID NO: 75986 - DNA, 120 bp, Homo sapiens
  misc_feature: 625 for SV(C|O) and mtDNA
tgaagcgaacagattttcgttcattttggttctcagggtttgttataattttttatttttatgggctttggtgagggaggtaggtggtagtttgtgtttaatatttttagttgggtgatg

SEQ ID NO: 75987 - DNA, 120 bp, Homo sapiens
  misc_feature: 625 for SV(C|O) and mtDNA
tctcctacttacaggactcaacatactagtcacagccctatactccctctacatatttaccacaacacaatggggctcactcacccaccacattaacaacataaaaccctcattcacacg

SEQ ID NO: 75988 - DNA, 120 bp, Homo sapiens
  misc_feature: 625 for SV(C|O) and mtDNA
tattcctcatcacccaactaaaaatattaaacacaaactaccacctacctccctcaccaaagcccataaaaataaaaaattataacaaaccctgagaaccaaaatgaacgaaaatctgtt

SEQ ID NO: 75989 - DNA, 120 bp, Homo sapiens
  misc_feature: 625 for SV(C|O) and mtDNA
tatcctgcccgccatcatcctagtcctcatcgccctcccatccctgcgcatcctttacataacagacgaggtcaacgatccctcccttaccatcaaatcaattggccaccaatggtactg

SEQ ID NO: 75990 - DNA, 120 bp, Homo sapiens; identical to SEQ ID NO: 56440
  misc_feature: 625 for SV(C|O) and mtDNA

SEQ ID NO: 75991 - DNA, 120 bp, Homo sapiens
  misc_feature: 625 for SV(C|O) and mtDNA
atacccccattatgtaaaatccattgtcgcatccacctttattatcagtctcttccccacaacaatattcatgtgcctagaccaagaagttattatctcgaactgacactgagccacaac

SEQ ID NO: 75992 - DNA, 120 bp, Homo sapiens
  misc_feature: 625 for SV(C|O) and mtDNA
cctaccatcacacaccgcacaatcccctatctaggccttcttacgagccaaaacctgcccctactcctcctagacctaacctgactagaaaagctattacctaaaacaatttcacagcac

SEQ ID NO: 75993 - DNA, 120 bp, Homo sapiens
  misc_feature: 625 for SV(C|O) and mtDNA
cccattctcctcctatccctcaaccccgacatcattaccgggttttcctcttgtaaatatagtttaaccaaaacatcagattgtgaatctgacaacagaggcttacgaccccttatttac

SEQ ID NO: 75994 - DNA, 120 bp, Homo sapiens
  misc_feature: 625 for SV(C|O) and mtDNA
accctactcctaatcacataacctattcccccgagcaatctcaattacaatatatacaccaacaaacaatgttcaaccagtaactactactaatcaacgcccataatcatacaaagcccc

SEQ ID NO: 75995 - DNA, 120 bp, Homo sapiens
  misc_feature: 625 for SV(C|O) and mtDNA
gggataatcctatttattacctcagaagtttttttcttcgcaggatttttctgagccttttaccactccagcctagcccctaccccccaattaggagggcactggcccccaacaggcatc

SEQ ID NO: 75996 - DNA, 120 bp, Homo sapiens
  misc_feature: 625 for SV(C|O) and mtDNA
ggctacaccctagaccaaacctacgccaaaatccatttcactatcatattcatcggcgtaaatctaactttcttcccacaacactttctcggcctatccggaatgccccgacgttactcg

SEQ ID NO: 75997 - DNA, 120 bp, Homo sapiens; identical to SEQ ID NO: 59268
  misc_feature: 625 for SV(C|O) and mtDNA

SEQ ID NO: 75998 - DNA, 120 bp, Homo sapiens
  misc_feature: 625 for SV(C|O) and mtDNA
aagcaccctaatcaactggcttcaatctacttctcccgccgccgggaaaaaaggcgggagaagccccggcaggtttgaagctgcttcttcgaatttgcaattcaatatgaaaatcacctc

SEQ ID NO: 75999 - DNA, 120 bp, Homo sapiens
  misc_feature: 625 for SV(C|O) and mtDNA
gactggcattgtattagcaaactcatcactagacatcgtactacacgacacgtactacgttgtagctcacttccactatgtcctatcaataggagctgtatttgccatcataggaggctt

SEQ ID NO: 76000 - DNA, 120 bp, Homo sapiens; identical to SEQ ID NO: 60928
  misc_feature: 625 for SV(C|O) and mtDNA

SEQ ID NO: 76001 - DNA, 120 bp, Homo sapiens
  misc_feature: 625 for SV(C|O) and mtDNA
gaactatcctgcccgccatcatcctagtcctcatcgccctcccatccctgcgcatcctttacataacagacgaggtcaacgatccctcccttaccatcaaatcaattggccaccaatggt

SEQ ID NO: 76002 - DNA, 120 bp, Homo sapiens; identical to SEQ ID NO: 52843
  misc_feature: 625 for SV(C|O) and mtDNA

SEQ ID NO: 76003 - DNA, 120 bp, Homo sapiens
  misc_feature: 625 for SV(C|O) and mtDNA
ctacaccttgacctaacgtctttacgtgggtacttgcgcttactttgtagccttcatcagggtttgctgaagatggcggtatataggctgagcaagaggtggtgaggttgatcggggttt

SEQ ID NO: 76004 - DNA, 120 bp, Homo sapiens
  misc_feature: 625 for SV(C|O) and mtDNA
cagcagccattcaagcaatcctatacaaccgtatcggcgatatcggtttcatcctcgccttagcatgatttatcctacactccaactcatgagacccacaacaaatagcccttctaaacg

SEQ ID NO: 76005 - DNA, 120 bp, Homo sapiens
  misc_feature: 625 for SV(C|O) and mtDNA
cctaatcaactggcttcaatctacttctcccgccgccgggaaaaaaggcgggagaagccccggcaggtttgaagctgcttcttcgaatttgcaattcaatatgaaaatcacctcggagct

SEQ ID NO: 76006 - DNA, 120 bp, Homo sapiens
  misc_feature: 625 for SV(C|O) and mtDNA
aggtaaaaaatcagtgcgagcttagcgctgtgatgagtgtgcctgcaaagatggtagagtagatgacgggttgggccaggggattaattagtacgggaagggtataaccaacattttcgg

SEQ ID NO: 76007 - DNA, 120 bp, Homo sapiens; identical to SEQ ID NO: 62951
  misc_feature: 625 for SV(C|O) and mtDNA

SEQ ID NO: 76008 - DNA, 120 bp, Homo sapiens
  misc_feature: 625 for SV(C|O) and mtDNA
atttggtatatgattgagatgggggctagtttttgtcatgtgagaagaagcaggccggatgtcagaggggtgccttgggtaacctctgggacccagaagtgaaagggggctattcctagt

SEQ ID NO: 76009 - DNA, 120 bp, Homo sapiens
  misc_feature: 625 for SV(C|O) and mtDNA
attgtttgggctactgctcgcagtgcgccgatcagggcgtagtttgagtttgatgctcaccctgatcagaggattgagtaaacggctaggctagaggtggctagaataaataggaggcct

SEQ ID NO: 76010 - DNA, 120 bp, Homo sapiens
  misc_feature: 625 for SV(C|O) and mtDNA
attgctcgggggaataggttatgtgattaggagtagggttaggatgagtgggaagaagaaagagaggaagtaaagtttaattatgcctttttgggttgaggtgatgatggaggtggagat

SEQ ID NO: 76011 - DNA, 120 bp, Homo sapiens
  misc_feature: 625 for SV(C|O) and mtDNA
attataccctagccaaccccttaaacacccctccccacatcaagcccgaatgatatttcctattcgcctacacaattctccgatccgtccctaacaaactaggaggcgtccttgccctat

SEQ ID NO: 76012 - DNA, 120 bp, Homo sapiens
  misc_feature: 625 for SV(C|O) and mtDNA
aggatcaggcaggcgccaaggagtgagccgaagtttcatcatgcggagatgttggatggggtggggaggtcgatgaatgagtggttaattaattttattagggggttaattttgcgtatt

SEQ ID NO: 76013 - DNA, 120 bp, Homo sapiens; identical to SEQ ID NO: 58131
  misc_feature: 625 for SV(C|O) and mtDNA

SEQ ID NO: 76014 - DNA, 120 bp, Homo sapiens
  misc_feature: 624 for SV(C|O) and mtDNA
tttttgggttgaggtgatgatggaggtggagatttggtgctgtgaaattgttttaggtaatagcttttctagtcaggttaggtctaggaggagtaggggcaggttttggctcgtaagaag

SEQ ID NO: 76015 - DNA, 120 bp, Homo sapiens; identical to SEQ ID NO: 54276
  misc_feature: 624 for SV(C|O) and mtDNA

SEQ ID NO: 76016 - DNA, 120 bp, Homo sapiens
  misc_feature: 624 for SV(C|O) and mtDNA
tttctaggcctactcaggtaaaaaatcagtgcgagcttagcgctgtgatgagtgtgcctgcaaagatggtagagtagatgacgggttgggccaggggattaattagtacgggaagggtat

SEQ ID NO: 76017 - DNA, 120 bp, Homo sapiens
  misc_feature: 624 for SV(C|O) and mtDNA
gtctgaactatcctgcccgccatcatcctagtcctcatcgccctcccatccctgcgcatcctttacataacagacgaggtcaacgatccctcccttaccatcaaatcaattggccaccaa

SEQ ID NO: 76018 - DNA, 120 bp, Homo sapiens
  misc_feature: 624 for SV(C|O) and mtDNA
ttggtatatgattgagatgggggctagtttttgtcatgtgagaagaagcaggccggatgtcagaggggtgccttgggtaacctctgggacccagaagtgaaagggggctattcctagttt

SEQ ID NO: 76019 - DNA, 120 bp, Homo sapiens
  misc_feature: 624 for SV(C|O) and mtDNA
ttgaggtgatgatggaggtggagatttggtgctgtgaaattgttttaggtaatagcttttctagtcaggttaggtctaggaggagtaggggcaggttttggctcgtaagaaggcctagat

SEQ ID NO: 76020 - DNA, 120 bp, Homo sapiens
  misc_feature: 624 for SV(C|O) and mtDNA
ttgagattgctcgggggaataggttatgtgattaggagtagggttaggatgagtgggaagaagaaagagaggaagtaaagtttaattatgcctttttgggttgaggtgatgatggaggtg

SEQ ID NO: 76021 - DNA, 120 bp, Homo sapiens; identical to SEQ ID NO: 52583
  misc_feature: 624 for SV(C|O) and mtDNA

SEQ ID NO: 76022 - DNA, 120 bp, Homo sapiens
  misc_feature: 624 for SV(C|O) and mtDNA
ttcaatctacttctcccgccgccgggaaaaaaggcgggagaagccccggcaggtttgaagctgcttcttcgaatttgcaattcaatatgaaaatcacctcggagctggtaaaaagaggcc

SEQ ID NO: 76023 - DNA, 120 bp, Homo sapiens
  misc_feature: 624 for SV(C|O) and mtDNA
ttagctgactcgccacactccacggaagcaatatgaaatgatctgctgcagtgctctgagccctaggattcatctttcttttcaccgtaggcggcctgactggcattgtattagcaaact

SEQ ID NO: 76024 - DNA, 120 bp, Homo sapiens
  misc_feature: 624 for SV(C|O) and mtDNA
taggagggtaaaatagagacccagtaaaattgtaataagcagtgcttgaattatttggtttcggttgttttctattagactatggtgagctcaggtgattgatactcctgatgcgagtaa

SEQ ID NO: 76025 - DNA, 120 bp, Homo sapiens; identical to SEQ ID NO: 58822
  misc_feature: 624 for SV(C|O) and mtDNA

SEQ ID NO: 76026 - DNA, 120 bp, Homo sapiens
  misc_feature: 624 for SV(C|O) and mtDNA
tgtttgggctactgctcgcagtgcgccgatcagggcgtagtttgagtttgatgctcaccctgatcagaggattgagtaaacggctaggctagaggtggctagaataaataggaggcctag

SEQ ID NO: 76027 - DNA, 120 bp, Homo sapiens
  misc_feature: 624 for SV(C|O) and mtDNA
ctacttcaaattcctccctgtacgaaaggacaagagaaataaggcctacttcacaaagcgccttcccccgtaaatgatatcatctcaacttagtattatacccacacccacccaagaaca

SEQ ID NO: 76028 - DNA, 120 bp, Homo sapiens
  misc_feature: 624 for SV(C|O) and mtDNA
cgtctgaactatcctgcccgccatcatcctagtcctcatcgccctcccatccctgcgcatcctttacataacagacgaggtcaacgatccctcccttaccatcaaatcaattggccacca

SEQ ID NO: 76029 - DNA, 120 bp, Homo sapiens; identical to SEQ ID NO: 56013
  misc_feature: 624 for SV(C|O) and mtDNA

SEQ ID NO: 76030 - DNA, 120 bp, Homo sapiens
  misc_feature: 624 for SV(C|O) and mtDNA
tgacctaacgtctttacgtgggtacttgcgcttactttgtagccttcatcagggtttgctgaagatggcggtatataggctgagcaagaggtggtgaggttgatcggggtttatcgatta

SEQ ID NO: 76031 - DNA, 120 bp, Homo sapiens
  misc_feature: 624 for SV(C|O) and mtDNA
agtaccgcaagggaaagatgaaaaattataaccaagcataatacagcaaggactaacccctataccttctgcataatgaattaactagaaataactttgcaaggagagccaaagctaaga

SEQ ID NO: 76032 - DNA, 120 bp, Homo sapiens
  misc_feature: 624 for SV(C|O) and mtDNA
ccgatggtgcagccgctattaaaggttcgtttgttcaacgattaaagtcctacgtgatctgagttcagaccggagtaatccaggtcggtttctatctacttcaaattcctccctgtacga

SEQ ID NO: 76033 - DNA, 120 bp, Homo sapiens
  misc_feature: 624 for SV(C|O) and mtDNA
caagggaaagatgaaaaattataaccaagcataatacagcaaggactaacccctataccttctgcataatgaattaactagaaataactttgcaaggagagccaaagctaagacccccga

SEQ ID NO: 76034 - DNA, 120 bp, Homo sapiens
  misc_feature: 624 for SV(C|O) and mtDNA
tcgctatccccaccggcgtcaaagtatttagctgactcgccacactccacggaagcaatatgaaatgatctgctgcagtgctctgagccctaggattcatctttcttttcaccgtaggcg

SEQ ID NO: 76035 - DNA, 120 bp, Homo sapiens
  misc_feature: 624 for SV(C|O) and mtDNA
tatcaatcacctgagctcaccatagtctaatagaaaacaaccgaaaccaaataattcaagcactgcttattacaattttactgggtctctattttaccctcctacaagcctcagagtact

SEQ ID NO: 76036 - DNA, 120 bp, Homo sapiens; identical to SEQ ID NO: 52394
  misc_feature: 624 for SV(C|O) and mtDNA

SEQ ID NO: 76037 - DNA, 120 bp, Homo sapiens
  misc_feature: 624 for SV(C|O) and mtDNA
taggcgacccagacaattataccctagccaaccccttaaacacccctccccacatcaagcccgaatgatatttcctattcgcctacacaattctccgatccgtccctaacaaactaggag

SEQ ID NO: 76038 - DNA, 120 bp, Homo sapiens; identical to SEQ ID NO: 53747
  misc_feature: 624 for SV(C|O) and mtDNA

SEQ ID NO: 76039 - DNA, 120 bp, Homo sapiens
  misc_feature: 624 for SV(C|O) and mtDNA
aaggagtatgggggtaattatggtgggccatacggtagtatttagttggggcatttcactgtaaagaggtgttggttctcttaatctttaacttaaaaggttaatgctaagttagcttta

SEQ ID NO: 76040 - DNA, 120 bp, Homo sapiens
  misc_feature: 624 for SV(C|O) and mtDNA
gtttttatgtactacaggtggtcaagtatttatggtaccgtacaatattcatggtggctggcagtaatgtacgaattacatagcggttgttgatgggtgagtcaatacttgggtggcacc

SEQ ID NO: 76041 - DNA, 120 bp, Homo sapiens; identical to SEQ ID NO: 54321
  misc_feature: 624 for SV(C|O) and mtDNA

SEQ ID NO: 76042 - DNA, 120 bp, Homo sapiens
  misc_feature: 624 for SV(C|O) and mtDNA
gtgcaactccaaataaaagtaacaaccatgcacactactataaccaccctaaccctgacttccctaattccccccatccttaccaccctcgttaaccctaacaaaaaaaactcatacccc

SEQ ID NO: 76043 - DNA, 120 bp, Homo sapiens
  misc_feature: 624 for SV(C|O) and mtDNA
ataccctagccaaccccttaaacacccctccccacatcaagcccgaatgatatttcctattcgcctacacaattctccgatccgtccctaacaaactaggaggcgtccttgccctattac

SEQ ID NO: 76044 - DNA, 120 bp, Homo sapiens
  misc_feature: 624 for SV(C|O) and mtDNA
ccgctatgtaattcgtacattactgccagccaccatgaatattgtacggtaccataaatacttgaccacctgtagtacataaaaacccaatccacatcaaaaccccctccccatgcttac

SEQ ID NO: 76045 - DNA, 120 bp, Homo sapiens
  misc_feature: 624 for SV(C|O) and mtDNA
ggttgaggtgatgatggaggtggagatttggtgctgtgaaattgttttaggtaatagcttttctagtcaggttaggtctaggaggagtaggggcaggttttggctcgtaagaaggcctag

SEQ ID NO: 76046 - DNA, 120 bp, Homo sapiens
  misc_feature: 624 for SV(C|O) and mtDNA
ggcattgtattagcaaactcatcactagacatcgtactacacgacacgtactacgttgtagctcacttccactatgtcctatcaataggagctgtatttgccatcataggaggcttcatt

SEQ ID NO: 76047 - DNA, 120 bp, Homo sapiens; identical to SEQ ID NO: 57519
  misc_feature: 624 for SV(C|O) and mtDNA

SEQ ID NO: 76048 - DNA, 120 bp, Homo sapiens
  misc_feature: 624 for SV(C|O) and mtDNA
aagaaagatgaatcctagggctcagagcactgcagcagatcatttcatattgcttccgtggagtgtggcgagtcagctaaatactttgacgccggtggggatagcgatgattatggtagc

SEQ ID NO: 76049 - DNA, 120 bp, Homo sapiens
  misc_feature: 624 for SV(C|O) and mtDNA
gctacaccttgacctaacgtctttacgtgggtacttgcgcttactttgtagccttcatcagggtttgctgaagatggcggtatataggctgagcaagaggtggtgaggttgatcggggtt

SEQ ID NO: 76050 - DNA, 120 bp, Homo sapiens
  misc_feature: 624 for SV(C|O) and mtDNA
caggggccctctcagccctcctaatgacctccggcctagccatgtgatttcacttccactccataacgctcctcatactaggcctactaaccaacacactaaccatataccaatgatggc

SEQ ID NO: 76051 - DNA, 120 bp, Homo sapiens
  misc_feature: 624 for SV(C|O) and mtDNA
cacacaccgcacaatcccctatctaggccttcttacgagccaaaacctgcccctactcctcctagacctaacctgactagaaaagctattacctaaaacaatttcacagcaccaaatctc

SEQ ID NO: 76052 - DNA, 120 bp, Homo sapiens
  misc_feature: 624 for SV(C|O) and mtDNA
gaatgaagcgaacagattttcgttcattttggttctcagggtttgttataattttttatttttatgggctttggtgagggaggtaggtggtagtttgtgtttaatatttttagttgggtg

SEQ ID NO: 76053 - DNA, 120 bp, Homo sapiens
  misc_feature: 624 for SV(C|O) and mtDNA
cctcctatccctcaaccccgacatcattaccgggttttcctcttgtaaatatagtttaaccaaaacatcagattgtgaatctgacaacagaggcttacgaccccttatttaccgagaaag

SEQ ID NO: 76054 - DNA, 120 bp, Homo sapiens
  misc_feature: 624 for SV(C|O) and mtDNA
cttactactccggaaaaaaagaaccatttggatacataggtatggtctgagctatgatatcaattggcttcctagggtttatcgtgtgagcacaccatatatttacagtaggaatagacg

SEQ ID NO: 76055 - DNA, 120 bp, Homo sapiens
  misc_feature: 624 for SV(C|O) and mtDNA
ctcacccactaggataccaacaaacctactcacccttaacagcacatagtacataaagccatttaccgtacatagcacattacagtcaaatcccttctcgtccccatggatgacccccct

SEQ ID NO: 76056 - DNA, 120 bp, Homo sapiens
  misc_feature: 624 for SV(C|O) and mtDNA
acccttaacagcacatagtacataaagccatttaccgtacatagcacattacagtcaaatcccttctcgtccccatggatgacccccctcagataggggtcccttgaccaccatcctccg

SEQ ID NO: 76057 - DNA, 120 bp, Homo sapiens
  misc_feature: 624 for SV(C|O) and mtDNA
cgccaccctagcaatatcaaccattaaccttccctctacacttatcatcttcacaattctaattctactgactatcctagaaatcgctgtcgccttaatccaagcctacgttttcacact

SEQ ID NO: 76058 - DNA, 120 bp, Homo sapiens; identical to SEQ ID NO: 61375
  misc_feature: 624 for SV(C|O) and mtDNA

SEQ ID NO: 76059 - DNA, 120 bp, Homo sapiens
  misc_feature: 624 for SV(C|O) and mtDNA
ccgcgtccctttctccataaaattcttcttagtagctattaccttcttattatttgatctagaaattgccctccttttacccctaccatgagccctacaaacaactaacctaccactaat

SEQ ID NO: 76060 - DNA, 120 bp, Homo sapiens
  misc_feature: 624 for SV(C|O) and mtDNA
atcccagtttgggtcttagctattgtgtgttcagatatgttaaagccactttcgtagtctattttgtgtcagctggagttttttacaactcaggtgagttttagctttattggggagggg

SEQ ID NO: 76061 - DNA, 120 bp, Homo sapiens
  misc_feature: 624 for SV(C|O) and mtDNA
attgagattgctcgggggaataggttatgtgattaggagtagggttaggatgagtgggaagaagaaagagaggaagtaaagtttaattatgcctttttgggttgaggtgatgatggaggt

SEQ ID NO: 76062 - DNA, 120 bp, Homo sapiens
  misc_feature: 624 for SV(C|O) and mtDNA
acctaagaaatatgtctgataaaagagttactttgatagagtaaataataggagcttaaacccccttatttctaggactatgagaatcgaacccatccctgagaatccaaaattctccgt

SEQ ID NO: 76063 - DNA, 120 bp, Homo sapiens
  misc_feature: 623 for SV(C|O) and mtDNA
ttgggtggcacccaaatctgcttccccatgaaagaacagagaatagtttaaattagaatcttagctttgggtgctaatggtggagttaaagactttttctctgatttgtccttggaaaaa

SEQ ID NO: 76064 - DNA, 120 bp, Homo sapiens; identical to SEQ ID NO: 53271
  misc_feature: 623 for SV(C|O) and mtDNA

SEQ ID NO: 76065 - DNA, 120 bp, Homo sapiens
  misc_feature: 623 for SV(C|O) and mtDNA
ttttattgctatagccattatgattattaatgatgagtattgattggtagtattggttatggttcattgtccggagagtatattgttgaagaggatagctattagaaggattatggatgc

SEQ ID NO: 76066 - DNA, 120 bp, Homo sapiens
  misc_feature: 623 for SV(C|O) and mtDNA
tttggtatatgattgagatgggggctagtttttgtcatgtgagaagaagcaggccggatgtcagaggggtgccttgggtaacctctgggacccagaagtgaaagggggctattcctagtt

SEQ ID NO: 76067 - DNA, 120 bp, Homo sapiens
  misc_feature: 623 for SV(C|O) and mtDNA
tcctgcccgccatcatcctagtcctcatcgccctcccatccctgcgcatcctttacataacagacgaggtcaacgatccctcccttaccatcaaatcaattggccaccaatggtactgaa

SEQ ID NO: 76068 - DNA, 120 bp, Homo sapiens
  misc_feature: 623 for SV(C|O) and mtDNA
ttagtcatgttagcttgtttcaggtgcgagatagtagtagggtcgtggtgctggagtttaagttgagtagtaggaatgcggtagtagttaggataatataaatagttaaattaagaatgg

SEQ ID NO: 76069 - DNA, 120 bp, Homo sapiens; identical to SEQ ID NO: 52530
  misc_feature: 623 for SV(C|O) and mtDNA

SEQ ID NO: 76070 - DNA, 120 bp, Homo sapiens; identical to SEQ ID NO: 60432
  misc_feature: 623 for SV(C|O) and mtDNA

SEQ ID NO: 76071 - DNA, 120 bp, Homo sapiens
  misc_feature: 623 for SV(C|O) and mtDNA
tggcttcaatctacttctcccgccgccgggaaaaaaggcgggagaagccccggcaggtttgaagctgcttcttcgaatttgcaattcaatatgaaaatcacctcggagctggtaaaaaga

SEQ ID NO: 76072 - DNA, 120 bp, Homo sapiens
  misc_feature: 623 for SV(C|O) and mtDNA
gacaaaacacatagcctaccccttccttgtactatccctatgaggcataattataacaagctccatctgcctacgacaaacagacctaaaatcgctcattgcatactcttcaatcagcca

SEQ ID NO: 76073 - DNA, 120 bp, Homo sapiens; identical to SEQ ID NO: 55771
  misc_feature: 623 for SV(C|O) and mtDNA

SEQ ID NO: 76074 - DNA, 120 bp, Homo sapiens; identical to SEQ ID NO: 55858
  misc_feature: 623 for SV(C|O) and mtDNA

SEQ ID NO: 76075 - DNA, 120 bp, Homo sapiens; identical to SEQ ID NO: 56936
  misc_feature: 623 for SV(C|O) and mtDNA

SEQ ID NO: 76076 - DNA, 120 bp, Homo sapiens
  misc_feature: 623 for SV(C|O) and mtDNA
tcttgggcagtgagagtgagtagtagaatgtttagtgagcctagggtgttgtgagtgtaaattagtgcgatgagtaggggaagggagcctactagggtgtagaataggaagtatgtgcct

SEQ ID NO: 76077 - DNA, 120 bp, Homo sapiens
  misc_feature: 623 for SV(C|O) and mtDNA
tcaagggacccctatctgaggggggtcatccatggggacgagaagggatttgactgtaatgtgctatgtacggtaaatggctttatgtactatgtgctgttaagggtgagtaggtttgtt

SEQ ID NO: 76078 - DNA, 120 bp, Homo sapiens
  misc_feature: 623 for SV(C|O) and mtDNA
ctgagccctaggattcatctttcttttcaccgtaggcggcctgactggcattgtattagcaaactcatcactagacatcgtactacacgacacgtactacgttgtagctcacttccacta

SEQ ID NO: 76079 - DNA, 120 bp, Homo sapiens; identical to SEQ ID NO: 54951
  misc_feature: 623 for SV(C|O) and mtDNA

SEQ ID NO: 76080 - DNA, 120 bp, Homo sapiens; identical to SEQ ID NO: 57969
  misc_feature: 623 for SV(C|O) and mtDNA

SEQ ID NO: 76081 - DNA, 120 bp, Homo sapiens; identical to SEQ ID NO: 62335
  misc_feature: 623 for SV(C|O) and mtDNA

SEQ ID NO: 76082 - DNA, 120 bp, Homo sapiens
  misc_feature: 623 for SV(C|O) and mtDNA
taacttactactccggaaaaaaagaaccatttggatacataggtatggtctgagctatgatatcaattggcttcctagggtttatcgtgtgagcacaccatatatttacagtaggaatag

SEQ ID NO: 76083 - DNA, 120 bp, Homo sapiens
  misc_feature: 623 for SV(C|O) and mtDNA
taacactatgcttaggcgctatcaccactctgttcgcagcagtctgcgcccttacacaaaatgacatcaaaaaaatcgtagccttctccacttcaagtcaactaggactcataatagtta

SEQ ID NO: 76084 - DNA, 120 bp, Homo sapiens
  misc_feature: 623 for SV(C|O) and mtDNA
ctcaggctacaccctagaccaaacctacgccaaaatccatttcactatcatattcatcggcgtaaatctaactttcttcccacaacactttctcggcctatccggaatgccccgacgtta

SEQ ID NO: 76085 - DNA, 120 bp, Homo sapiens; identical to SEQ ID NO: 52802
  misc_feature: 623 for SV(C|O) and mtDNA

SEQ ID NO: 76086 - DNA, 120 bp, Homo sapiens
  misc_feature: 623 for SV(C|O) and mtDNA
gttcttgggcagtgagagtgagtagtagaatgtttagtgagcctagggtgttgtgagtgtaaattagtgcgatgagtaggggaagggagcctactagggtgtagaataggaagtatgtgc

SEQ ID NO: 76087 - DNA, 120 bp, Homo sapiens
  misc_feature: 623 for SV(C|O) and mtDNA
atctacttctcccgccgccgggaaaaaaggcgggagaagccccggcaggtttgaagctgcttcttcgaatttgcaattcaatatgaaaatcacctcggagctggtaaaaagaggcctaac

SEQ ID NO: 76088 - DNA, 120 bp, Homo sapiens
  misc_feature: 623 for SV(C|O) and mtDNA
ccgcccgcgtccctttctccataaaattcttcttagtagctattaccttcttattatttgatctagaaattgccctccttttacccctaccatgagccctacaaacaactaacctaccac

SEQ ID NO: 76089 - DNA, 120 bp, Homo sapiens
  misc_feature: 623 for SV(C|O) and mtDNA
aacataagcttctgactcttacctccctctctcctactcctgctcgcatctgctatagtggaggccggagcaggaacaggttgaacagtctaccctcccttagcagggaactactcccac

SEQ ID NO: 76090 - DNA, 120 bp, Homo sapiens
  misc_feature: 623 for SV(C|O) and mtDNA
ggcattcctaatgcttaccgaacgaaaaattctaggctatatacaactacgcaaaggccccaacgttgtaggcccctacgggctactacaacccttcgctgacgccataaaactcttcac

SEQ ID NO: 76091 - DNA, 120 bp, Homo sapiens
  misc_feature: 623 for SV(C|O) and mtDNA
gtaggcctagtatgaggagcgttatggagtggaagtgaaatcacatggctaggccggaggtcattaggagggctgagagggcccctgttaggggtcatgggctgggttttactatatgat

SEQ ID NO: 76092 - DNA, 120 bp, Homo sapiens
  misc_feature: 623 for SV(C|O) and mtDNA
ccataacccaataccaaacgcccctcttcgtctgatccgtcctaatcacagcagtcctacttctcctatctctcccagtcctagctgctggcatcactatactactaacagaccgcaacc

SEQ ID NO: 76093 - DNA, 120 bp, Homo sapiens
  misc_feature: 623 for SV(C|O) and mtDNA
cataagcttctgactcttacctccctctctcctactcctgctcgcatctgctatagtggaggccggagcaggaacaggttgaacagtctaccctcccttagcagggaactactcccaccc

SEQ ID NO: 76094 - DNA, 120 bp, Homo sapiens
  misc_feature: 623 for SV(C|O) and mtDNA
accgcaagggaaagatgaaaaattataaccaagcataatacagcaaggactaacccctataccttctgcataatgaattaactagaaataactttgcaaggagagccaaagctaagaccc

SEQ ID NO: 76095 - DNA, 120 bp, Homo sapiens; identical to SEQ ID NO: 56641
  misc_feature: 623 for SV(C|O) and mtDNA

SEQ ID NO: 76096 - DNA, 120 bp, Homo sapiens
  misc_feature: 623 for SV(C|O) and mtDNA
ctacactattaaagtttaccacaaccaccaccccatcatactctttcacccacagcaccaatcctacctccatcgctaaccccactaaaacactcaccaagacctcaacccctgaccccc

SEQ ID NO: 76097 - DNA, 120 bp, Homo sapiens
  misc_feature: 623 for SV(C|O) and mtDNA
acacaccgcacaatcccctatctaggccttcttacgagccaaaacctgcccctactcctcctagacctaacctgactagaaaagctattacctaaaacaatttcacagcaccaaatctcc

SEQ ID NO: 76098 - DNA, 120 bp, Homo sapiens
  misc_feature: 623 for SV(C|O) and mtDNA
gcctgactggcattgtattagcaaactcatcactagacatcgtactacacgacacgtactacgttgtagctcacttccactatgtcctatcaataggagctgtatttgccatcataggag

SEQ ID NO: 76099 - DNA, 120 bp, Homo sapiens
  misc_feature: 623 for SV(C|O) and mtDNA
gatcaggcaggcgccaaggagtgagccgaagtttcatcatgcggagatgttggatggggtggggaggtcgatgaatgagtggttaattaattttattagggggttaattttgcgtattgg

SEQ ID NO: 76100 - DNA, 120 bp, Homo sapiens; identical to SEQ ID NO: 57116
  misc_feature: 623 for SV(C|O) and mtDNA

SEQ ID NO: 76101 - DNA, 120 bp, Homo sapiens
  misc_feature: 623 for SV(C|O) and mtDNA
ctcccgccgccgggaaaaaaggcgggagaagccccggcaggtttgaagctgcttcttcgaatttgcaattcaatatgaaaatcacctcggagctggtaaaaagaggcctaacccctgtct

SEQ ID NO: 76102 - DNA, 120 bp, Homo sapiens
  misc_feature: 623 for SV(C|O) and mtDNA
ctatcatctgtaggctcattcatttctctaacagcagtaatattaataattttcatgatttgagaagccttcgcttcgaagcgaaaagtcctaatagtagaagaaccctccataaacctg

SEQ ID NO: 76103 - DNA, 120 bp, Homo sapiens
  misc_feature: 623 for SV(C|O) and mtDNA
ctaatcaactggcttcaatctacttctcccgccgccgggaaaaaaggcgggagaagccccggcaggtttgaagctgcttcttcgaatttgcaattcaatatgaaaatcacctcggagctg

SEQ ID NO: 76104 - DNA, 120 bp, Homo sapiens
  misc_feature: 623 for SV(C|O) and mtDNA
cgctatccccaccggcgtcaaagtatttagctgactcgccacactccacggaagcaatatgaaatgatctgctgcagtgctctgagccctaggattcatctttcttttcaccgtaggcgg

SEQ ID NO: 76105 - DNA, 120 bp, Homo sapiens
  misc_feature: 623 for SV(C|O) and mtDNA
agatgaatcctagggctcagagcactgcagcagatcatttcatattgcttccgtggagtgtggcgagtcagctaaatactttgacgccggtggggatagcgatgattatggtagcggagg

SEQ ID NO: 76106 - DNA, 120 bp, Homo sapiens
  misc_feature: 623 for SV(C|O) and mtDNA
acaggggccctctcagccctcctaatgacctccggcctagccatgtgatttcacttccactccataacgctcctcatactaggcctactaaccaacacactaaccatataccaatgatgg

SEQ ID NO: 76107 - DNA, 120 bp, Homo sapiens; identical to SEQ ID NO: 62957
  misc_feature: 623 for SV(C|O) and mtDNA

SEQ ID NO: 76108 - DNA, 120 bp, Homo sapiens
  misc_feature: 623 for SV(C|O) and mtDNA
cactattaaagtttaccacaaccaccaccccatcatactctttcacccacagcaccaatcctacctccatcgctaaccccactaaaacactcaccaagacctcaacccctgacccccatg

SEQ ID NO: 76109 - DNA, 120 bp, Homo sapiens
  misc_feature: 623 for SV(C|O) and mtDNA
accccctagcagaaaatagcccactaatccaaactctaacactatgcttaggcgctatcaccactctgttcgcagcagtctgcgcccttacacaaaatgacatcaaaaaaatcgtagcct

SEQ ID NO: 76110 - DNA, 120 bp, Homo sapiens
  misc_feature: 623 for SV(C|O) and mtDNA
actgttcattatagctactctcataaccctcaacacccactccctcttagccaatattgtgcctattgccatactagtctttgccgcctgcgaagcagcggtgggcctagccctactagt

SEQ ID NO: 76111 - DNA, 120 bp, Homo sapiens; identical to SEQ ID NO: 59675
  misc_feature: 623 for SV(C|O) and mtDNA

SEQ ID NO: 76112 - DNA, 120 bp, Homo sapiens
  misc_feature: 622 for SV(C|O) and mtDNA
ttactactccggaaaaaaagaaccatttggatacataggtatggtctgagctatgatatcaattggcttcctagggtttatcgtgtgagcacaccatatatttacagtaggaatagacgt

SEQ ID NO: 76113 - DNA, 120 bp, Homo sapiens
  misc_feature: 622 for SV(C|O) and mtDNA
ttaacactattctcaccagacctcctaggcgacccagacaattataccctagccaaccccttaaacacccctccccacatcaagcccgaatgatatttcctattcgcctacacaattctc

SEQ ID NO: 76114 - DNA, 120 bp, Homo sapiens; identical to SEQ ID NO: 62270
  misc_feature: 622 for SV(C|O) and mtDNA

SEQ ID NO: 76115 - DNA, 120 bp, Homo sapiens; identical to SEQ ID NO: 53823
  misc_feature: 622 for SV(C|O) and mtDNA

SEQ ID NO: 76116 - DNA, 120 bp, Homo sapiens
  misc_feature: 622 for SV(C|O) and mtDNA
tgctaatacaatgccagtcaggccgcctacggtgaaaagaaagatgaatcctagggctcagagcactgcagcagatcatttcatattgcttccgtggagtgtggcgagtcagctaaatac

SEQ ID NO: 76117 - DNA, 120 bp, Homo sapiens; identical to SEQ ID NO: 57169
  misc_feature: 622 for SV(C|O) and mtDNA

SEQ ID NO: 76118 - DNA, 120 bp, Homo sapiens
  misc_feature: 622 for SV(C|O) and mtDNA
cagcacatagtacataaagccatttaccgtacatagcacattacagtcaaatcccttctcgtccccatggatgacccccctcagataggggtcccttgaccaccatcctccgtgaaatca

SEQ ID NO: 76119 - DNA, 120 bp, Homo sapiens
  misc_feature: 622 for SV(C|O) and mtDNA
aaagatgaatcctagggctcagagcactgcagcagatcatttcatattgcttccgtggagtgtggcgagtcagctaaatactttgacgccggtggggatagcgatgattatggtagcgga

SEQ ID NO: 76120 - DNA, 120 bp, Homo sapiens
  misc_feature: 622 for SV(C|O) and mtDNA
tagttttattgctatagccattatgattattaatgatgagtattgattggtagtattggttatggttcattgtccggagagtatattgttgaagaggatagctattagaaggattatgga

SEQ ID NO: 76121 - DNA, 120 bp, Homo sapiens
  misc_feature: 622 for SV(C|O) and mtDNA
gagattgctcgggggaataggttatgtgattaggagtagggttaggatgagtgggaagaagaaagagaggaagtaaagtttaattatgcctttttgggttgaggtgatgatggaggtgga

SEQ ID NO: 76122 - DNA, 120 bp, Homo sapiens; identical to SEQ ID NO: 62576
  misc_feature: 622 for SV(C|O) and mtDNA

SEQ ID NO: 76123 - DNA, 120 bp, Homo sapiens; identical to SEQ ID NO: 52782
  misc_feature: 622 for SV(C|O) and mtDNA

SEQ ID NO: 76124 - DNA, 120 bp, Homo sapiens
  misc_feature: 622 for SV(C|O) and mtDNA
gaaccaggcgacctgcgactccttgacgttgacaatcgagtagtactcccgattgaagcccccattcgtataataattacatcacaagacgtcttgcactcatgagctgtccccacatta

SEQ ID NO: 76125 - DNA, 120 bp, Homo sapiens
  misc_feature: 622 for SV(C|O) and mtDNA
ggtatatgattgagatgggggctagtttttgtcatgtgagaagaagcaggccggatgtcagaggggtgccttgggtaacctctgggacccagaagtgaaagggggctattcctagtttta

SEQ ID NO: 76126 - DNA, 120 bp, Homo sapiens
  misc_feature: 622 for SV(C|O) and mtDNA
aaaccttgtagagagagtaaaaaatttaacacccatagtaggcctaaaagcagccaccaattaagaaagcgttcaagctcaacacccactacctaaaaaatcccaaacatataactgaac

SEQ ID NO: 76127 - DNA, 120 bp, Homo sapiens; identical to SEQ ID NO: 59202
  misc_feature: 622 for SV(C|O) and mtDNA

SEQ ID NO: 76128 - DNA, 120 bp, Homo sapiens; identical to SEQ ID NO: 58320
  misc_feature: 622 for SV(C|O) and mtDNA

SEQ ID NO: 76129 - DNA, 120 bp, Homo sapiens; identical to SEQ ID NO: 57414
  misc_feature: 622 for SV(C|O) and mtDNA

SEQ ID NO: 76130 - DNA, 120 bp, Homo sapiens
  misc_feature: 622 for SV(C|O) and mtDNA
ggtgcaactccaaataaaagtaacaaccatgcacactactataaccaccctaaccctgacttccctaattccccccatccttaccaccctcgttaaccctaacaaaaaaaactcataccc

SEQ ID NO: 76131 - DNA, 120 bp, Homo sapiens; identical to SEQ ID NO: 55044
  misc_feature: 622 for SV(C|O) and mtDNA

SEQ ID NO: 76132 - DNA, 120 bp, Homo sapiens
  misc_feature: 622 for SV(C|O) and mtDNA
cctcacccactaggataccaacaaacctactcacccttaacagcacatagtacataaagccatttaccgtacatagcacattacagtcaaatcccttctcgtccccatggatgacccccc

SEQ ID NO: 76133 - DNA, 120 bp, Homo sapiens
  misc_feature: 622 for SV(C|O) and mtDNA
ccttgtagagagagtaaaaaatttaacacccatagtaggcctaaaagcagccaccaattaagaaagcgttcaagctcaacacccactacctaaaaaatcccaaacatataactgaactcc

SEQ ID NO: 76134 - DNA, 120 bp, Homo sapiens
  misc_feature: 622 for SV(C|O) and mtDNA
cttcaatctacttctcccgccgccgggaaaaaaggcgggagaagccccggcaggtttgaagctgcttcttcgaatttgcaattcaatatgaaaatcacctcggagctggtaaaaagaggc

SEQ ID NO: 76135 - DNA, 120 bp, Homo sapiens
  misc_feature: 622 for SV(C|O) and mtDNA
ctgactggcattgtattagcaaactcatcactagacatcgtactacacgacacgtactacgttgtagctcacttccactatgtcctatcaataggagctgtatttgccatcataggaggc

SEQ ID NO: 76136 - DNA, 120 bp, Homo sapiens
  misc_feature: 622 for SV(C|O) and mtDNA
ccaccctaaccctgacttccctaattccccccatccttaccaccctcgttaaccctaacaaaaaaaactcatacccccattatgtaaaatccattgtcgcatccacctttattatcagtc

SEQ ID NO: 76137 - DNA, 120 bp, Homo sapiens; identical to SEQ ID NO: 57463
  misc_feature: 622 for SV(C|O) and mtDNA

SEQ ID NO: 76138 - DNA, 120 bp, Homo sapiens; identical to SEQ ID NO: 53421
  misc_feature: 622 for SV(C|O) and mtDNA

SEQ ID NO: 76139 - DNA, 120 bp, Homo sapiens; identical to SEQ ID NO: 60714
  misc_feature: 622 for SV(C|O) and mtDNA

SEQ ID NO: 76140 - DNA, 120 bp, Homo sapiens
  misc_feature: 622 for SV(C|O) and mtDNA
agaaattaagtattgcaacttactgagggctttgaaggctcttggtctgtatttaacctaaatttctataagattattagtataaaaggggagataggtaggagtagcgtggtaagggcg

SEQ ID NO: 76141 - DNA, 120 bp, Homo sapiens
  misc_feature: 622 for SV(C|O) and mtDNA
accttgacctaacgtctttacgtgggtacttgcgcttactttgtagccttcatcagggtttgctgaagatggcggtatataggctgagcaagaggtggtgaggttgatcggggtttatcg

SEQ ID NO: 76142 - DNA, 120 bp, Homo sapiens
  misc_feature: 622 for SV(C|O) and mtDNA
aggtgatgatggaggtggagatttggtgctgtgaaattgttttaggtaatagcttttctagtcaggttaggtctaggaggagtaggggcaggttttggctcgtaagaaggcctagatagg

SEQ ID NO: 76143 - DNA, 120 bp, Homo sapiens; identical to SEQ ID NO: 61230
  misc_feature: 622 for SV(C|O) and mtDNA

SEQ ID NO: 76144 - DNA, 120 bp, Homo sapiens
  misc_feature: 622 for SV(C|O) and mtDNA
atccctgagaatccaaaattctccgtgccacctatcacaccccatcctaaagtaaggtcagctaaataagctatcgggcccataccccgaaaatgttggttatacccttcccgtactaat

SEQ ID NO: 76145 - DNA, 120 bp, Homo sapiens; identical to SEQ ID NO: 59895
  misc_feature: 622 for SV(C|O) and mtDNA

SEQ ID NO: 76146 - DNA, 120 bp, Homo sapiens; identical to SEQ ID NO: 57590
  misc_feature: 622 for SV(C|O) and mtDNA

SEQ ID NO: 76147 - DNA, 120 bp, Homo sapiens
  misc_feature: 622 for SV(C|O) and mtDNA
atggattttacataatgggggtatgagttttttttgttagggttaacgagggtggtaaggatggggggaattagggaagtcagggttagggtggttatagtagtgtgcatggttgttact

SEQ ID NO: 76148 - DNA, 120 bp, Homo sapiens; identical to SEQ ID NO: 58227
  misc_feature: 622 for SV(C|O) and mtDNA

SEQ ID NO: 76149 - DNA, 120 bp, Homo sapiens; identical to SEQ ID NO: 57593
  misc_feature: 622 for SV(C|O) and mtDNA

SEQ ID NO: 76150 - DNA, 120 bp, Homo sapiens
  misc_feature: 622 for SV(C|O) and mtDNA
agtacacttaccatgttacgacttgtctcctctatataaatgcgtaggggttttagttaaatgtcctttgaagtatacttgaggagggtgacgggcggtgtgtacgcgcttcagggccct

SEQ ID NO: 76151 - DNA, 120 bp, Homo sapiens
  misc_feature: 622 for SV(C|O) and mtDNA
aaagctattacctaaaacaatttcacagcaccaaatctccacctccatcatcacctcaacccaaaaaggcataattaaactttacttcctctctttcttcttcccactcatcctaaccct

SEQ ID NO: 76152 - DNA, 120 bp, Homo sapiens; identical to SEQ ID NO: 57507
  misc_feature: 622 for SV(C|O) and mtDNA

SEQ ID NO: 76153 - DNA, 120 bp, Homo sapiens; identical to SEQ ID NO: 58072
  misc_feature: 622 for SV(C|O) and mtDNA

SEQ ID NO: 76154 - DNA, 120 bp, Homo sapiens; identical to SEQ ID NO: 53251
  misc_feature: 622 for SV(C|O) and mtDNA

SEQ ID NO: 76155 - DNA, 120 bp, Homo sapiens
  misc_feature: 621 for SV(C|O) and mtDNA
acactcaccaagacctcaacccctgacccccatgcctcaggatactcctcaatagccatcgctgtagtatatccaaagacaaccatcattccccctaaataaattaaaaaaactattaaa

SEQ ID NO: 76156 - DNA, 120 bp, Homo sapiens
  misc_feature: 621 for SV(C|O) and mtDNA
tatttagctgactcgccacactccacggaagcaatatgaaatgatctgctgcagtgctctgagccctaggattcatctttcttttcaccgtaggcggcctgactggcattgtattagcaa

SEQ ID NO: 76157 - DNA, 120 bp, Homo sapiens
  misc_feature: 621 for SV(C|O) and mtDNA
ttcttgggcagtgagagtgagtagtagaatgtttagtgagcctagggtgttgtgagtgtaaattagtgcgatgagtaggggaagggagcctactagggtgtagaataggaagtatgtgcc

SEQ ID NO: 76158 - DNA, 120 bp, Homo sapiens
  misc_feature: 621 for SV(C|O) and mtDNA
tatccatcctcatcctagcaataatccccatcctccatatatccaaacaacaaagcataatatttcgcccactaagccaatcactttattgactcctagccgcagacctcctcattctaa

SEQ ID NO: 76159 - DNA, 120 bp, Homo sapiens; identical to SEQ ID NO: 61667
  misc_feature: 621 for SV(C|O) and mtDNA

SEQ ID NO: 76160 - DNA, 120 bp, Homo sapiens
  misc_feature: 621 for SV(C|O) and mtDNA
aattaagggtgttagtcatgttagcttgtttcaggtgcgagatagtagtagggtcgtggtgctggagtttaagttgagtagtaggaatgcggtagtagttaggataatataaatagttaa

SEQ ID NO: 76161 - DNA, 120 bp, Homo sapiens
  misc_feature: 621 for SV(C|O) and mtDNA
caaaacacatagcctaccccttccttgtactatccctatgaggcataattataacaagctccatctgcctacgacaaacagacctaaaatcgctcattgcatactcttcaatcagccaca

SEQ ID NO: 76162 - DNA, 120 bp, Homo sapiens
  misc_feature: 621 for SV(C|O) and mtDNA
tcccatattgtaacttactactccggaaaaaaagaaccatttggatacataggtatggtctgagctatgatatcaattggcttcctagggtttatcgtgtgagcacaccatatatttaca

SEQ ID NO: 76163 - DNA, 120 bp, Homo sapiens
  misc_feature: 621 for SV(C|O) and mtDNA
tggttgttacttttatttggagttgcaccaaaatttttggggcctaagaccaatggatagctgttatcctttaaaagttgagaaagccatgttgttagacatgggggcatgagttagcag

SEQ ID NO: 76164 - DNA, 120 bp, Homo sapiens
  misc_feature: 621 for SV(C|O) and mtDNA
tggtgcaactccaaataaaagtaacaaccatgcacactactataaccaccctaaccctgacttccctaattccccccatccttaccaccctcgttaaccctaacaaaaaaaactcatacc

SEQ ID NO: 76165 - DNA, 120 bp, Homo sapiens; identical to SEQ ID NO: 54638
  misc_feature: 621 for SV(C|O) and mtDNA

SEQ ID NO: 76166 - DNA, 120 bp, Homo sapiens; identical to SEQ ID NO: 58953
  misc_feature: 621 for SV(C|O) and mtDNA

SEQ ID NO: 76167 - DNA, 120 bp, Homo sapiens; identical to SEQ ID NO: 59064
  misc_feature: 621 for SV(C|O) and mtDNA

SEQ ID NO: 76168 - DNA, 120 bp, Homo sapiens
  misc_feature: 621 for SV(C|O) and mtDNA
cgaggcctatattacggatcatttctctactcagaaacctgaaacatcggcattatcctcctgcttgcaactatagcaacagccttcataggctatgtcctcccgtgaggccaaatatca

SEQ ID NO: 76169 - DNA, 120 bp, Homo sapiens
  misc_feature: 621 for SV(C|O) and mtDNA
tgaggtgatgatggaggtggagatttggtgctgtgaaattgttttaggtaatagcttttctagtcaggttaggtctaggaggagtaggggcaggttttggctcgtaagaaggcctagata

SEQ ID NO: 76170 - DNA, 120 bp, Homo sapiens
  misc_feature: 621 for SV(C|O) and mtDNA
cttgtaggagggtaaaatagagacccagtaaaattgtaataagcagtgcttgaattatttggtttcggttgttttctattagactatggtgagctcaggtgattgatactcctgatgcga

SEQ ID NO: 76171 - DNA, 120 bp, Homo sapiens
  misc_feature: 621 for SV(C|O) and mtDNA
tcaggctacaccctagaccaaacctacgccaaaatccatttcactatcatattcatcggcgtaaatctaactttcttcccacaacactttctcggcctatccggaatgccccgacgttac

SEQ ID NO: 76172 - DNA, 120 bp, Homo sapiens
  misc_feature: 621 for SV(C|O) and mtDNA
tcacccccactgatgttcgccgaccgttgactattctctacaaaccacaaagacattggaacactatacctattattcggcgcatgagctggagtcctaggcacagctctaagcctcctt

SEQ ID NO: 76173 - DNA, 120 bp, Homo sapiens; identical to SEQ ID NO: 56605
  misc_feature: 621 for SV(C|O) and mtDNA

SEQ ID NO: 76174 - DNA, 120 bp, Homo sapiens; identical to SEQ ID NO: 55349
  misc_feature: 621 for SV(C|O) and mtDNA

SEQ ID NO: 76175 - DNA, 120 bp, Homo sapiens
  misc_feature: 621 for SV(C|O) and mtDNA
gggttgaggtgatgatggaggtggagatttggtgctgtgaaattgttttaggtaatagcttttctagtcaggttaggtctaggaggagtaggggcaggttttggctcgtaagaaggccta

SEQ ID NO: 76176 - DNA, 120 bp, Homo sapiens; identical to SEQ ID NO: 56980
  misc_feature: 621 for SV(C|O) and mtDNA

SEQ ID NO: 76177 - DNA, 120 bp, Homo sapiens; identical to SEQ ID NO: 53054
  misc_feature: 621 for SV(C|O) and mtDNA

SEQ ID NO: 76178 - DNA, 120 bp, Homo sapiens
  misc_feature: 621 for SV(C|O) and mtDNA
taatcaactggcttcaatctacttctcccgccgccgggaaaaaaggcgggagaagccccggcaggtttgaagctgcttcttcgaatttgcaattcaatatgaaaatcacctcggagctgg

SEQ ID NO: 76179 - DNA, 120 bp, Homo sapiens; identical to SEQ ID NO: 59050
  misc_feature: 621 for SV(C|O) and mtDNA

SEQ ID NO: 76180 - DNA, 120 bp, Homo sapiens
  misc_feature: 621 for SV(C|O) and mtDNA
ctctgagccctaggattcatctttcttttcaccgtaggcggcctgactggcattgtattagcaaactcatcactagacatcgtactacacgacacgtactacgttgtagctcacttccac

SEQ ID NO: 76181 - DNA, 120 bp, Homo sapiens; identical to SEQ ID NO: 53808
  misc_feature: 621 for SV(C|O) and mtDNA

SEQ ID NO: 76182 - DNA, 120 bp, Homo sapiens; identical to SEQ ID NO: 58715
  misc_feature: 621 for SV(C|O) and mtDNA

SEQ ID NO: 76183 - DNA, 120 bp, Homo sapiens
  misc_feature: 621 for SV(C|O) and mtDNA
ccgtctgaactatcctgcccgccatcatcctagtcctcatcgccctcccatccctgcgcatcctttacataacagacgaggtcaacgatccctcccttaccatcaaatcaattggccacc

SEQ ID NO: 76184 - DNA, 120 bp, Homo sapiens; identical to SEQ ID NO: 61047
  misc_feature: 621 for SV(C|O) and mtDNA

SEQ ID NO: 76185 - DNA, 120 bp, Homo sapiens
  misc_feature: 621 for SV(C|O) and mtDNA
ccctcacccactaggataccaacaaacctactcacccttaacagcacatagtacataaagccatttaccgtacatagcacattacagtcaaatcccttctcgtccccatggatgaccccc

SEQ ID NO: 76186 - DNA, 120 bp, Homo sapiens
  misc_feature: 621 for SV(C|O) and mtDNA
ggataagtggcgttggcttgccatgattgtgaggggtaggagtcaggtagttagtattaggaggggggttgttagggggtcggaggaaaaggttggggaacagctaaataggttgttgtt

SEQ ID NO: 76187 - DNA, 120 bp, Homo sapiens; identical to SEQ ID NO: 59329
  misc_feature: 621 for SV(C|O) and mtDNA

SEQ ID NO: 76188 - DNA, 120 bp, Homo sapiens
  misc_feature: 621 for SV(C|O) and mtDNA
acagcacatagtacataaagccatttaccgtacatagcacattacagtcaaatcccttctcgtccccatggatgacccccctcagataggggtcccttgaccaccatcctccgtgaaatc

SEQ ID NO: 76189 - DNA, 120 bp, Homo sapiens
  misc_feature: 621 for SV(C|O) and mtDNA
gatctgctgcagtgctctgagccctaggattcatctttcttttcaccgtaggcggcctgactggcattgtattagcaaactcatcactagacatcgtactacacgacacgtactacgttg

SEQ ID NO: 76190 - DNA, 120 bp, Homo sapiens; identical to SEQ ID NO: 56747
  misc_feature: 621 for SV(C|O) and mtDNA

SEQ ID NO: 76191 - DNA, 120 bp, Homo sapiens; identical to SEQ ID NO: 61008
  misc_feature: 621 for SV(C|O) and mtDNA

SEQ ID NO: 76192 - DNA, 120 bp, Homo sapiens; identical to SEQ ID NO: 58359
  misc_feature: 621 for SV(C|O) and mtDNA

SEQ ID NO: 76193 - DNA, 120 bp, Homo sapiens; identical to SEQ ID NO: 60336
  misc_feature: 621 for SV(C|O) and mtDNA

SEQ ID NO: 76194 - DNA, 120 bp, Homo sapiens
  misc_feature: 621 for SV(C|O) and mtDNA
cctgactggcattgtattagcaaactcatcactagacatcgtactacacgacacgtactacgttgtagctcacttccactatgtcctatcaataggagctgtatttgccatcataggagg

SEQ ID NO: 76195 - DNA, 120 bp, Homo sapiens
  misc_feature: 621 for SV(C|O) and mtDNA
aggcttgtaggagggtaaaatagagacccagtaaaattgtaataagcagtgcttgaattatttggtttcggttgttttctattagactatggtgagctcaggtgattgatactcctgatg

SEQ ID NO: 76196 - DNA, 120 bp, Homo sapiens
  misc_feature: 621 for SV(C|O) and mtDNA
agtgctctgagccctaggattcatctttcttttcaccgtaggcggcctgactggcattgtattagcaaactcatcactagacatcgtactacacgacacgtactacgttgtagctcactt

SEQ ID NO: 76197 - DNA, 120 bp, Homo sapiens
  misc_feature: 621 for SV(C|O) and mtDNA
aatcggaggacaaccagtaagctacccttttaccatcattggacaagtagcatccgtactatacttcacaacaatcctaatcctaataccaactatctccctaattgaaaacaaaatact

SEQ ID NO: 76198 - DNA, 120 bp, Homo sapiens; identical to SEQ ID NO: 55738
  misc_feature: 620 for SV(C|O) and mtDNA

SEQ ID NO: 76199 - DNA, 120 bp, Homo sapiens; identical to SEQ ID NO: 52582
  misc_feature: 620 for SV(C|O) and mtDNA

SEQ ID NO: 76200 - DNA, 120 bp, Homo sapiens
  misc_feature: 620 for SV(C|O) and mtDNA
catacccccattatgtaaaatccattgtcgcatccacctttattatcagtctcttccccacaacaatattcatgtgcctagaccaagaagttattatctcgaactgacactgagccacaa

SEQ ID NO: 76201 - DNA, 120 bp, Homo sapiens
  misc_feature: 620 for SV(C|O) and mtDNA
ctttttgggttgaggtgatgatggaggtggagatttggtgctgtgaaattgttttaggtaatagcttttctagtcaggttaggtctaggaggagtaggggcaggttttggctcgtaagaa

SEQ ID NO: 76202 - DNA, 120 bp, Homo sapiens; identical to SEQ ID NO: 60504
  misc_feature: 620 for SV(C|O) and mtDNA

SEQ ID NO: 76203 - DNA, 120 bp, Homo sapiens
  misc_feature: 620 for SV(C|O) and mtDNA
actctcctacttacaggactcaacatactagtcacagccctatactccctctacatatttaccacaacacaatggggctcactcacccaccacattaacaacataaaaccctcattcaca

SEQ ID NO: 76204 - DNA, 120 bp, Homo sapiens
  misc_feature: 620 for SV(C|O) and mtDNA
tgtaacttactactccggaaaaaaagaaccatttggatacataggtatggtctgagctatgatatcaattggcttcctagggtttatcgtgtgagcacaccatatatttacagtaggaat

SEQ ID NO: 76205 - DNA, 120 bp, Homo sapiens
  misc_feature: 620 for SV(C|O) and mtDNA
tgcttaggcgctatcaccactctgttcgcagcagtctgcgcccttacacaaaatgacatcaaaaaaatcgtagccttctccacttcaagtcaactaggactcataatagttacaatcggc

SEQ ID NO: 76206 - DNA, 120 bp, Homo sapiens; identical to SEQ ID NO: 58584
  misc_feature: 620 for SV(C|O) and mtDNA

SEQ ID NO: 76207 - DNA, 120 bp, Homo sapiens; identical to SEQ ID NO: 58166
  misc_feature: 620 for SV(C|O) and mtDNA

SEQ ID NO: 76208 - DNA, 120 bp, Homo sapiens
  misc_feature: 620 for SV(C|O) and mtDNA
tctgctgcagtgctctgagccctaggattcatctttcttttcaccgtaggcggcctgactggcattgtattagcaaactcatcactagacatcgtactacacgacacgtactacgttgta

SEQ ID NO: 76209 - DNA, 120 bp, Homo sapiens
  misc_feature: 620 for SV(C|O) and mtDNA
tctgcctcttcctacacatcgggcgaggcctatattacggatcatttctctactcagaaacctgaaacatcggcattatcctcctgcttgcaactatagcaacagccttcataggctatg

SEQ ID NO: 76210 - DNA, 120 bp, Homo sapiens
  misc_feature: 620 for SV(C|O) and mtDNA
ggcctgactggcattgtattagcaaactcatcactagacatcgtactacacgacacgtactacgttgtagctcacttccactatgtcctatcaataggagctgtatttgccatcatagga

SEQ ID NO: 76211 - DNA, 120 bp, Homo sapiens
  misc_feature: 620 for SV(C|O) and mtDNA
tcaatctacttctcccgccgccgggaaaaaaggcgggagaagccccggcaggtttgaagctgcttcttcgaatttgcaattcaatatgaaaatcacctcggagctggtaaaaagaggcct

SEQ ID NO: 76212 - DNA, 120 bp, Homo sapiens
  misc_feature: 620 for SV(C|O) and mtDNA
gtttaccacaaccaccaccccatcatactctttcacccacagcaccaatcctacctccatcgctaaccccactaaaacactcaccaagacctcaacccctgacccccatgcctcaggata

SEQ ID NO: 76213 - DNA, 120 bp, Homo sapiens
  misc_feature: 620 for SV(C|O) and mtDNA
tagtaccgcaagggaaagatgaaaaattataaccaagcataatacagcaaggactaacccctataccttctgcataatgaattaactagaaataactttgcaaggagagccaaagctaag

SEQ ID NO: 76214 - DNA, 120 bp, Homo sapiens
  misc_feature: 620 for SV(C|O) and mtDNA
tacctaagaacagctaaaagagcacacccgtctatgtagcaaaatagtgggaagatttataggtagaggcgacaaacctaccgagcctggtgatagctggttgtccaagatagaatctta

SEQ ID NO: 76215 - DNA, 120 bp, Homo sapiens
  misc_feature: 620 for SV(C|O) and mtDNA
taagaacagctaaaagagcacacccgtctatgtagcaaaatagtgggaagatttataggtagaggcgacaaacctaccgagcctggtgatagctggttgtccaagatagaatcttagttc

SEQ ID NO: 76216 - DNA, 120 bp, Homo sapiens; identical to SEQ ID NO: 52886
  misc_feature: 620 for SV(C|O) and mtDNA

SEQ ID NO: 76217 - DNA, 120 bp, Homo sapiens; identical to SEQ ID NO: 59020
  misc_feature: 620 for SV(C|O) and mtDNA

SEQ ID NO: 76218 - DNA, 120 bp, Homo sapiens
  misc_feature: 620 for SV(C|O) and mtDNA
cacatagcctaccccttccttgtactatccctatgaggcataattataacaagctccatctgcctacgacaaacagacctaaaatcgctcattgcatactcttcaatcagccacatagcc

SEQ ID NO: 76219 - DNA, 120 bp, Homo sapiens
  misc_feature: 620 for SV(C|O) and mtDNA
ggattttacataatgggggtatgagttttttttgttagggttaacgagggtggtaaggatggggggaattagggaagtcagggttagggtggttatagtagtgtgcatggttgttacttt

SEQ ID NO: 76220 - DNA, 120 bp, Homo sapiens
  misc_feature: 620 for SV(C|O) and mtDNA
ggacaggtggtgtgtggtggccttggtatgtgctttctcgtgttacatcgcgccatcattggtatatggttagtgtgttggttagtaggcctagtatgaggagcgttatggagtggaagt

SEQ ID NO: 76221 - DNA, 120 bp, Homo sapiens; identical to SEQ ID NO: 60136
  misc_feature: 620 for SV(C|O) and mtDNA

SEQ ID NO: 76222 - DNA, 120 bp, Homo sapiens
  misc_feature: 620 for SV(C|O) and mtDNA
gctgactcgccacactccacggaagcaatatgaaatgatctgctgcagtgctctgagccctaggattcatctttcttttcaccgtaggcggcctgactggcattgtattagcaaactcat

SEQ ID NO: 76223 - DNA, 120 bp, Homo sapiens; identical to SEQ ID NO: 54820
  misc_feature: 620 for SV(C|O) and mtDNA

SEQ ID NO: 76224 - DNA, 120 bp, Homo sapiens; identical to SEQ ID NO: 61468
  misc_feature: 620 for SV(C|O) and mtDNA

SEQ ID NO: 76225 - DNA, 120 bp, Homo sapiens
  misc_feature: 620 for SV(C|O) and mtDNA
gcaagggaaagatgaaaaattataaccaagcataatacagcaaggactaacccctataccttctgcataatgaattaactagaaataactttgcaaggagagccaaagctaagacccccg

SEQ ID NO: 76226 - DNA, 120 bp, Homo sapiens
  misc_feature: 620 for SV(C|O) and mtDNA
caatactcatcattaataatcataatggctatagcaataaaactaggaatagccccctttcacttctgggtcccagaggttacccaaggcacccctctgacatccggcctgcttcttctc

SEQ ID NO: 76227 - DNA, 120 bp, Homo sapiens
  misc_feature: 620 for SV(C|O) and mtDNA
ctcacccccactgatgttcgccgaccgttgactattctctacaaaccacaaagacattggaacactatacctattattcggcgcatgagctggagtcctaggcacagctctaagcctcct

SEQ ID NO: 76228 - DNA, 120 bp, Homo sapiens
  misc_feature: 620 for SV(C|O) and mtDNA
cctaagaaatatgtctgataaaagagttactttgatagagtaaataataggagcttaaacccccttatttctaggactatgagaatcgaacccatccctgagaatccaaaattctccgtg

SEQ ID NO: 76229 - DNA, 120 bp, Homo sapiens; identical to SEQ ID NO: 59507
  misc_feature: 620 for SV(C|O) and mtDNA

SEQ ID NO: 76230 - DNA, 120 bp, Homo sapiens
  misc_feature: 620 for SV(C|O) and mtDNA
catccatggggacgagaagggatttgactgtaatgtgctatgtacggtaaatggctttatgtactatgtgctgttaagggtgagtaggtttgttggtatcctagtgggtgaggggtggct

SEQ ID NO: 76231 - DNA, 120 bp, Homo sapiens; identical to SEQ ID NO: 56270
  misc_feature: 620 for SV(C|O) and mtDNA

SEQ ID NO: 76232 - DNA, 120 bp, Homo sapiens; identical to SEQ ID NO: 52707
  misc_feature: 620 for SV(C|O) and mtDNA

SEQ ID NO: 76233 - DNA, 120 bp, Homo sapiens; identical to SEQ ID NO: 61314
  misc_feature: 619 for SV(C|O) and mtDNA

SEQ ID NO: 76234 - DNA, 120 bp, Homo sapiens
  misc_feature: 619 for SV(C|O) and mtDNA
atttagctgactcgccacactccacggaagcaatatgaaatgatctgctgcagtgctctgagccctaggattcatctttcttttcaccgtaggcggcctgactggcattgtattagcaaa

SEQ ID NO: 76235 - DNA, 120 bp, Homo sapiens; identical to SEQ ID NO: 52932
  misc_feature: 619 for SV(C|O) and mtDNA

SEQ ID NO: 76236 - DNA, 120 bp, Homo sapiens; identical to SEQ ID NO: 53849
  misc_feature: 619 for SV(C|O) and mtDNA

SEQ ID NO: 76237 - DNA, 120 bp, Homo sapiens
  misc_feature: 619 for SV(C|O) and mtDNA
ttctcaggctacaccctagaccaaacctacgccaaaatccatttcactatcatattcatcggcgtaaatctaactttcttcccacaacactttctcggcctatccggaatgccccgacgt

SEQ ID NO: 76238 - DNA, 120 bp, Homo sapiens; identical to SEQ ID NO: 56892
  misc_feature: 619 for SV(C|O) and mtDNA

SEQ ID NO: 76239 - DNA, 120 bp, Homo sapiens
  misc_feature: 619 for SV(C|O) and mtDNA
aatctacttctcccgccgccgggaaaaaaggcgggagaagccccggcaggtttgaagctgcttcttcgaatttgcaattcaatatgaaaatcacctcggagctggtaaaaagaggcctaa

SEQ ID NO: 76240 - DNA, 120 bp, Homo sapiens
  misc_feature: 619 for SV(C|O) and mtDNA
tgcctttttgggttgaggtgatgatggaggtggagatttggtgctgtgaaattgttttaggtaatagcttttctagtcaggttaggtctaggaggagtaggggcaggttttggctcgtaa

SEQ ID NO: 76241 - DNA, 120 bp, Homo sapiens
  misc_feature: 619 for SV(C|O) and mtDNA
tcaactggcttcaatctacttctcccgccgccgggaaaaaaggcgggagaagccccggcaggtttgaagctgcttcttcgaatttgcaattcaatatgaaaatcacctcggagctggtaa

SEQ ID NO: 76242 - DNA, 120 bp, Homo sapiens; identical to SEQ ID NO: 61341
  misc_feature: 619 for SV(C|O) and mtDNA

SEQ ID NO: 76243 - DNA, 120 bp, Homo sapiens; identical to SEQ ID NO: 53123
  misc_feature: 619 for SV(C|O) and mtDNA

SEQ ID NO: 76244 - DNA, 120 bp, Homo sapiens
  misc_feature: 619 for SV(C|O) and mtDNA
tgggttgaggtgatgatggaggtggagatttggtgctgtgaaattgttttaggtaatagcttttctagtcaggttaggtctaggaggagtaggggcaggttttggctcgtaagaaggcct

SEQ ID NO: 76245 - DNA, 120 bp, Homo sapiens
  misc_feature: 619 for SV(C|O) and mtDNA
tggggacgagaagggatttgactgtaatgtgctatgtacggtaaatggctttatgtactatgtgctgttaagggtgagtaggtttgttggtatcctagtgggtgaggggtggctttggag

SEQ ID NO: 76246 - DNA, 120 bp, Homo sapiens
  misc_feature: 619 for SV(C|O) and mtDNA
tgatctgctgcagtgctctgagccctaggattcatctttcttttcaccgtaggcggcctgactggcattgtattagcaaactcatcactagacatcgtactacacgacacgtactacgtt

SEQ ID NO: 76247 - DNA, 120 bp, Homo sapiens; identical to SEQ ID NO: 55773
  misc_feature: 619 for SV(C|O) and mtDNA

SEQ ID NO: 76248 - DNA, 120 bp, Homo sapiens; identical to SEQ ID NO: 60003
  misc_feature: 619 for SV(C|O) and mtDNA

SEQ ID NO: 76249 - DNA, 120 bp, Homo sapiens
  misc_feature: 619 for SV(C|O) and mtDNA
atggggacgagaagggatttgactgtaatgtgctatgtacggtaaatggctttatgtactatgtgctgttaagggtgagtaggtttgttggtatcctagtgggtgaggggtggctttgga

SEQ ID NO: 76250 - DNA, 120 bp, Homo sapiens
  misc_feature: 619 for SV(C|O) and mtDNA
tcactggataagtggcgttggcttgccatgattgtgaggggtaggagtcaggtagttagtattaggaggggggttgttagggggtcggaggaaaaggttggggaacagctaaataggttg

SEQ ID NO: 76251 - DNA, 120 bp, Homo sapiens
  misc_feature: 619 for SV(C|O) and mtDNA
cttaacagcacatagtacataaagccatttaccgtacatagcacattacagtcaaatcccttctcgtccccatggatgacccccctcagataggggtcccttgaccaccatcctccgtga

SEQ ID NO: 76252 - DNA, 120 bp, Homo sapiens
  misc_feature: 619 for SV(C|O) and mtDNA
aattataccctagccaaccccttaaacacccctccccacatcaagcccgaatgatatttcctattcgcctacacaattctccgatccgtccctaacaaactaggaggcgtccttgcccta

SEQ ID NO: 76253 - DNA, 120 bp, Homo sapiens
  misc_feature: 619 for SV(C|O) and mtDNA
gacttttcgcttcgaagcgaaggcttctcaaatcatgaaaattattaatattactgctgttagagaaatgaatgagcctacagatgataggatgtttcatgtggtgtatgcatcggggta

SEQ ID NO: 76254 - DNA, 120 bp, Homo sapiens; identical to SEQ ID NO: 60191
  misc_feature: 619 for SV(C|O) and mtDNA

SEQ ID NO: 76255 - DNA, 120 bp, Homo sapiens; identical to SEQ ID NO: 52801
  misc_feature: 619 for SV(C|O) and mtDNA

SEQ ID NO: 76256 - DNA, 120 bp, Homo sapiens
  misc_feature: 619 for SV(C|O) and mtDNA
gacttccctaattccccccatccttaccaccctcgttaaccctaacaaaaaaaactcatacccccattatgtaaaatccattgtcgcatccacctttattatcagtctcttccccacaac

SEQ ID NO: 76257 - DNA, 120 bp, Homo sapiens
  misc_feature: 619 for SV(C|O) and mtDNA
acataagcttctgactcttacctccctctctcctactcctgctcgcatctgctatagtggaggccggagcaggaacaggttgaacagtctaccctcccttagcagggaactactcccacc

SEQ ID NO: 76258 - DNA, 120 bp, Homo sapiens
  misc_feature: 619 for SV(C|O) and mtDNA
ccattctcctcctatccctcaaccccgacatcattaccgggttttcctcttgtaaatatagtttaaccaaaacatcagattgtgaatctgacaacagaggcttacgaccccttatttacc

SEQ ID NO: 76259 - DNA, 120 bp, Homo sapiens
  misc_feature: 619 for SV(C|O) and mtDNA
gctttctcaacttttaaaggataacagctatccattggtcttaggccccaaaaattttggtgcaactccaaataaaagtaacaaccatgcacactactataaccaccctaaccctgactt

SEQ ID NO: 76260 - DNA, 120 bp, Homo sapiens
  misc_feature: 619 for SV(C|O) and mtDNA
gctgaatcatccgctaccttcacgccaatggcgcctcaatattctttatctgcctcttcctacacatcgggcgaggcctatattacggatcatttctctactcagaaacctgaaacatcg

SEQ ID NO: 76261 - DNA, 120 bp, Homo sapiens; identical to SEQ ID NO: 57815
  misc_feature: 619 for SV(C|O) and mtDNA

SEQ ID NO: 76262 - DNA, 120 bp, Homo sapiens
  misc_feature: 619 for SV(C|O) and mtDNA
gcggcggcttcgaagccaaagtgatgtttggatgtaaagtgaaatattagttggcggatgaagcagatagtgaggaaagttgagccaataatgacgtgaagtccgtggaagcctgtggct

SEQ ID NO: 76263 - DNA, 120 bp, Homo sapiens; identical to SEQ ID NO: 61746
  misc_feature: 619 for SV(C|O) and mtDNA

SEQ ID NO: 76264 - DNA, 120 bp, Homo sapiens
  misc_feature: 619 for SV(C|O) and mtDNA
cccataatcatacaaagcccccgcaccaataggatcctcccgaatcaaccctgacccctctccttcataaattattcagcttcctacactattaaagtttaccacaaccaccaccccatc

SEQ ID NO: 76265 - DNA, 120 bp, Homo sapiens; identical to SEQ ID NO: 59962
  misc_feature: 619 for SV(C|O) and mtDNA

SEQ ID NO: 76266 - DNA, 120 bp, Homo sapiens
  misc_feature: 619 for SV(C|O) and mtDNA
ctcgtccccatggatgacccccctcagataggggtcccttgaccaccatcctccgtgaaatcaatatcccgcacaagagtgctactctcctcgctccgggcccataacacttgggggtag

SEQ ID NO: 76267 - DNA, 120 bp, Homo sapiens
  misc_feature: 619 for SV(C|O) and mtDNA
agattgctcgggggaataggttatgtgattaggagtagggttaggatgagtgggaagaagaaagagaggaagtaaagtttaattatgcctttttgggttgaggtgatgatggaggtggag

SEQ ID NO: 76268 - DNA, 120 bp, Homo sapiens
  misc_feature: 619 for SV(C|O) and mtDNA
attctcaggctacaccctagaccaaacctacgccaaaatccatttcactatcatattcatcggcgtaaatctaactttcttcccacaacactttctcggcctatccggaatgccccgacg

SEQ ID NO: 76269 - DNA, 120 bp, Homo sapiens; identical to SEQ ID NO: 57755
  misc_feature: 619 for SV(C|O) and mtDNA

SEQ ID NO: 76270 - DNA, 120 bp, Homo sapiens
  misc_feature: 619 for SV(C|O) and mtDNA
caatgaatgaagcgaacagattttcgttcattttggttctcagggtttgttataattttttatttttatgggctttggtgagggaggtaggtggtagtttgtgtttaatatttttagttg

SEQ ID NO: 76271 - DNA, 120 bp, Homo sapiens
  misc_feature: 619 for SV(C|O) and mtDNA
agccctaggattcatctttcttttcaccgtaggcggcctgactggcattgtattagcaaactcatcactagacatcgtactacacgacacgtactacgttgtagctcacttccactatgt

SEQ ID NO: 76272 - DNA, 120 bp, Homo sapiens; identical to SEQ ID NO: 59447
  misc_feature: 619 for SV(C|O) and mtDNA

SEQ ID NO: 76273 - DNA, 120 bp, Homo sapiens; identical to SEQ ID NO: 52794
  misc_feature: 618 for SV(C|O) and mtDNA

SEQ ID NO: 76274 - DNA, 120 bp, Homo sapiens
  misc_feature: 618 for SV(C|O) and mtDNA
gacacaaaatagactacgaaagtggctttaacatatctgaacacacaatagctaagacccaaactgggattagataccccactatgcttagccctaaacctcaacagttaaatcaacaaa

SEQ ID NO: 76275 - DNA, 120 bp, Homo sapiens; identical to SEQ ID NO: 61813
  misc_feature: 618 for SV(C|O) and mtDNA

SEQ ID NO: 76276 - DNA, 120 bp, Homo sapiens
  misc_feature: 618 for SV(C|O) and mtDNA
tgttagggacggatcggagaattgtgtaggcgaataggaaatatcattcgggcttgatgtggggaggggtgtttaaggggttggctagggtataattgtctgggtcgcctaggaggtctg

SEQ ID NO: 76277 - DNA, 120 bp, Homo sapiens
  misc_feature: 618 for SV(C|O) and mtDNA
tgtaagcatggggagggggttttgatgtggattgggtttttatgtactacaggtggtcaagtatttatggtaccgtacaatattcatggtggctggcagtaatgtacgaattacatagcg

SEQ ID NO: 76278 - DNA, 120 bp, Homo sapiens
  misc_feature: 618 for SV(C|O) and mtDNA
tcctaatcacataacctattcccccgagcaatctcaattacaatatatacaccaacaaacaatgttcaaccagtaactactactaatcaacgcccataatcatacaaagcccccgcacca

SEQ ID NO: 76279 - DNA, 120 bp, Homo sapiens
  misc_feature: 618 for SV(C|O) and mtDNA
tctgaactatcctgcccgccatcatcctagtcctcatcgccctcccatccctgcgcatcctttacataacagacgaggtcaacgatccctcccttaccatcaaatcaattggccaccaat

SEQ ID NO: 76280 - DNA, 120 bp, Homo sapiens
  misc_feature: 618 for SV(C|O) and mtDNA
ctcctacttacaggactcaacatactagtcacagccctatactccctctacatatttaccacaacacaatggggctcactcacccaccacattaacaacataaaaccctcattcacacga

SEQ ID NO: 76281 - DNA, 120 bp, Homo sapiens; identical to SEQ ID NO: 52636
  misc_feature: 618 for SV(C|O) and mtDNA

SEQ ID NO: 76282 - DNA, 120 bp, Homo sapiens; identical to SEQ ID NO: 60918
  misc_feature: 618 for SV(C|O) and mtDNA

SEQ ID NO: 76283 - DNA, 120 bp, Homo sapiens
  misc_feature: 618 for SV(C|O) and mtDNA
tatctgcctcttcctacacatcgggcgaggcctatattacggatcatttctctactcagaaacctgaaacatcggcattatcctcctgcttgcaactatagcaacagccttcataggcta

SEQ ID NO: 76284 - DNA, 120 bp, Homo sapiens; identical to SEQ ID NO: 55775
  misc_feature: 618 for SV(C|O) and mtDNA

SEQ ID NO: 76285 - DNA, 120 bp, Homo sapiens
  misc_feature: 618 for SV(C|O) and mtDNA
caatctacttctcccgccgccgggaaaaaaggcgggagaagccccggcaggtttgaagctgcttcttcgaatttgcaattcaatatgaaaatcacctcggagctggtaaaaagaggccta

SEQ ID NO: 76286 - DNA, 120 bp, Homo sapiens; identical to SEQ ID NO: 61438
  misc_feature: 618 for SV(C|O) and mtDNA

SEQ ID NO: 76287 - DNA, 120 bp, Homo sapiens
  misc_feature: 618 for SV(C|O) and mtDNA
gttgactattctctacaaaccacaaagacattggaacactatacctattattcggcgcatgagctggagtcctaggcacagctctaagcctccttattcgagccgagctgggccagccag

SEQ ID NO: 76288 - DNA, 120 bp, Homo sapiens
  misc_feature: 618 for SV(C|O) and mtDNA
accgtctgaactatcctgcccgccatcatcctagtcctcatcgccctcccatccctgcgcatcctttacataacagacgaggtcaacgatccctcccttaccatcaaatcaattggccac

SEQ ID NO: 76289 - DNA, 120 bp, Homo sapiens
  misc_feature: 618 for SV(C|O) and mtDNA
gaaaagctattacctaaaacaatttcacagcaccaaatctccacctccatcatcacctcaacccaaaaaggcataattaaactttacttcctctctttcttcttcccactcatcctaacc

SEQ ID NO: 76290 - DNA, 120 bp, Homo sapiens
  misc_feature: 618 for SV(C|O) and mtDNA
acatagcctaccccttccttgtactatccctatgaggcataattataacaagctccatctgcctacgacaaacagacctaaaatcgctcattgcatactcttcaatcagccacatagccc

SEQ ID NO: 76291 - DNA, 120 bp, Homo sapiens; identical to SEQ ID NO: 62129
  misc_feature: 618 for SV(C|O) and mtDNA

SEQ ID NO: 76292 - DNA, 120 bp, Homo sapiens
  misc_feature: 618 for SV(C|O) and mtDNA
gattgtttgggctactgctcgcagtgcgccgatcagggcgtagtttgagtttgatgctcaccctgatcagaggattgagtaaacggctaggctagaggtggctagaataaataggaggcc

SEQ ID NO: 76293 - DNA, 120 bp, Homo sapiens
  misc_feature: 618 for SV(C|O) and mtDNA
gaccctatggagctttaatttattaatgcaaacagtacctaacaaacccacaggtcctaaactaccaaacctgcattaaaaatttcggttggggcgacctcggagcagaacccaacctcc

SEQ ID NO: 76294 - DNA, 120 bp, Homo sapiens
  misc_feature: 618 for SV(C|O) and mtDNA
gctcacacgataaaccctaggaagccaattgatatcatagctcagaccatacctatgtatccaaatggttctttttttccggagtagtaagttacaatatgggagattattccgaagcct

SEQ ID NO: 76295 - DNA, 120 bp, Homo sapiens; identical to SEQ ID NO: 57616
  misc_feature: 618 for SV(C|O) and mtDNA

SEQ ID NO: 76296 - DNA, 120 bp, Homo sapiens; identical to SEQ ID NO: 57909
  misc_feature: 618 for SV(C|O) and mtDNA

SEQ ID NO: 76297 - DNA, 120 bp, Homo sapiens
  misc_feature: 618 for SV(C|O) and mtDNA
ctgaactatcctgcccgccatcatcctagtcctcatcgccctcccatccctgcgcatcctttacataacagacgaggtcaacgatccctcccttaccatcaaatcaattggccaccaatg

SEQ ID NO: 76298 - DNA, 120 bp, Homo sapiens
  misc_feature: 618 for SV(C|O) and mtDNA
cgcccgcgtccctttctccataaaattcttcttagtagctattaccttcttattatttgatctagaaattgccctccttttacccctaccatgagccctacaaacaactaacctaccact

SEQ ID NO: 76299 - DNA, 120 bp, Homo sapiens
  misc_feature: 618 for SV(C|O) and mtDNA
aggggccctctcagccctcctaatgacctccggcctagccatgtgatttcacttccactccataacgctcctcatactaggcctactaaccaacacactaaccatataccaatgatggcg

SEQ ID NO: 76300 - DNA, 120 bp, Homo sapiens; identical to SEQ ID NO: 54018
  misc_feature: 618 for SV(C|O) and mtDNA

SEQ ID NO: 76301 - DNA, 120 bp, Homo sapiens
  misc_feature: 618 for SV(C|O) and mtDNA
acagaaattaagtattgcaacttactgagggctttgaaggctcttggtctgtatttaacctaaatttctataagattattagtataaaaggggagataggtaggagtagcgtggtaaggg

SEQ ID NO: 76302 - DNA, 120 bp, Homo sapiens; identical to SEQ ID NO: 52764
  misc_feature: 618 for SV(C|O) and mtDNA

SEQ ID NO: 76303 - DNA, 120 bp, Homo sapiens
  misc_feature: 618 for SV(C|O) and mtDNA
ccccctagcagaaaatagcccactaatccaaactctaacactatgcttaggcgctatcaccactctgttcgcagcagtctgcgcccttacacaaaatgacatcaaaaaaatcgtagcctt

SEQ ID NO: 76304 - DNA, 120 bp, Homo sapiens
  misc_feature: 618 for SV(C|O) and mtDNA
caggcggcggcttcgaagccaaagtgatgtttggatgtaaagtgaaatattagttggcggatgaagcagatagtgaggaaagttgagccaataatgacgtgaagtccgtggaagcctgtg

SEQ ID NO: 76305 - DNA, 120 bp, Homo sapiens
  misc_feature: 618 for SV(C|O) and mtDNA
atagccaaggtggggataagtgtggtttcgaagaagatataaaatatgattagttctgtggctgtgaatgttataattaaggagatttgtagggagattagtatagagaggtagagtttt

SEQ ID NO: 76306 - DNA, 120 bp, Homo sapiens; identical to SEQ ID NO: 59994
  misc_feature: 618 for SV(C|O) and mtDNA

SEQ ID NO: 76307 - DNA, 120 bp, Homo sapiens; identical to SEQ ID NO: 56332
  misc_feature: 617 for SV(C|O) and mtDNA

SEQ ID NO: 76308 - DNA, 120 bp, Homo sapiens; identical to SEQ ID NO: 55853
  misc_feature: 617 for SV(C|O) and mtDNA

SEQ ID NO: 76309 - DNA, 120 bp, Homo sapiens; identical to SEQ ID NO: 52867
  misc_feature: 617 for SV(C|O) and mtDNA

SEQ ID NO: 76310 - DNA, 120 bp, Homo sapiens; identical to SEQ ID NO: 52678
  misc_feature: 617 for SV(C|O) and mtDNA

SEQ ID NO: 76311 - DNA, 120 bp, Homo sapiens
  misc_feature: 617 for SV(C|O) and mtDNA
tcatacccccattatgtaaaatccattgtcgcatccacctttattatcagtctcttccccacaacaatattcatgtgcctagaccaagaagttattatctcgaactgacactgagccaca

SEQ ID NO: 76312 - DNA, 120 bp, Homo sapiens
  misc_feature: 617 for SV(C|O) and mtDNA
cccgcccgcgtccctttctccataaaattcttcttagtagctattaccttcttattatttgatctagaaattgccctccttttacccctaccatgagccctacaaacaactaacctacca

SEQ ID NO: 76313 - DNA, 120 bp, Homo sapiens
  misc_feature: 617 for SV(C|O) and mtDNA
tgctctgagccctaggattcatctttcttttcaccgtaggcggcctgactggcattgtattagcaaactcatcactagacatcgtactacacgacacgtactacgttgtagctcacttcc

SEQ ID NO: 76314 - DNA, 120 bp, Homo sapiens; identical to SEQ ID NO: 60344
  misc_feature: 617 for SV(C|O) and mtDNA

SEQ ID NO: 76315 - DNA, 120 bp, Homo sapiens
  misc_feature: 617 for SV(C|O) and mtDNA
tcctagcaataatccccatcctccatatatccaaacaacaaagcataatatttcgcccactaagccaatcactttattgactcctagccgcagacctcctcattctaacctgaatcggag

SEQ ID NO: 76316 - DNA, 120 bp, Homo sapiens
  misc_feature: 617 for SV(C|O) and mtDNA
tactactccggaaaaaaagaaccatttggatacataggtatggtctgagctatgatatcaattggcttcctagggtttatcgtgtgagcacaccatatatttacagtaggaatagacgta

SEQ ID NO: 76317 - DNA, 120 bp, Homo sapiens; identical to SEQ ID NO: 62092
  misc_feature: 617 for SV(C|O) and mtDNA

SEQ ID NO: 76318 - DNA, 120 bp, Homo sapiens
  misc_feature: 617 for SV(C|O) and mtDNA
taacactattctcaccagacctcctaggcgacccagacaattataccctagccaaccccttaaacacccctccccacatcaagcccgaatgatatttcctattcgcctacacaattctcc

SEQ ID NO: 76319 - DNA, 120 bp, Homo sapiens; identical to SEQ ID NO: 58888
  misc_feature: 617 for SV(C|O) and mtDNA

SEQ ID NO: 76320 - DNA, 120 bp, Homo sapiens
  misc_feature: 617 for SV(C|O) and mtDNA
cctgcccgccatcatcctagtcctcatcgccctcccatccctgcgcatcctttacataacagacgaggtcaacgatccctcccttaccatcaaatcaattggccaccaatggtactgaac

SEQ ID NO: 76321 - DNA, 120 bp, Homo sapiens
  misc_feature: 617 for SV(C|O) and mtDNA
agaaaagctattacctaaaacaatttcacagcaccaaatctccacctccatcatcacctcaacccaaaaaggcataattaaactttacttcctctctttcttcttcccactcatcctaac

SEQ ID NO: 76322 - DNA, 120 bp, Homo sapiens
  misc_feature: 617 for SV(C|O) and mtDNA
atccatcctcatcctagcaataatccccatcctccatatatccaaacaacaaagcataatatttcgcccactaagccaatcactttattgactcctagccgcagacctcctcattctaac

SEQ ID NO: 76323 - DNA, 120 bp, Homo sapiens
  misc_feature: 617 for SV(C|O) and mtDNA
gcgccaccctagcaatatcaaccattaaccttccctctacacttatcatcttcacaattctaattctactgactatcctagaaatcgctgtcgccttaatccaagcctacgttttcacac

SEQ ID NO: 76324 - DNA, 120 bp, Homo sapiens
  misc_feature: 617 for SV(C|O) and mtDNA
ctcctaatcacataacctattcccccgagcaatctcaattacaatatatacaccaacaaacaatgttcaaccagtaactactactaatcaacgcccataatcatacaaagcccccgcacc

SEQ ID NO: 76325 - DNA, 120 bp, Homo sapiens
  misc_feature: 617 for SV(C|O) and mtDNA
ccccgcccgcgtccctttctccataaaattcttcttagtagctattaccttcttattatttgatctagaaattgccctccttttacccctaccatgagccctacaaacaactaacctacc

SEQ ID NO: 76326 - DNA, 120 bp, Homo sapiens; identical to SEQ ID NO: 62243
  misc_feature: 617 for SV(C|O) and mtDNA

SEQ ID NO: 76327 - DNA, 120 bp, Homo sapiens
  misc_feature: 617 for SV(C|O) and mtDNA
gactaatcaaactaacctcaaaacaaatgataaccatacacaacactaaaggacgaacctgatctcttatactagtatccttaatcatttttattgccacaactaacctcctcggactcc

SEQ ID NO: 76328 - DNA, 120 bp, Homo sapiens
  misc_feature: 617 for SV(C|O) and mtDNA
ctgacaaaacacatagcctaccccttccttgtactatccctatgaggcataattataacaagctccatctgcctacgacaaacagacctaaaatcgctcattgcatactcttcaatcagc

SEQ ID NO: 76329 - DNA, 120 bp, Homo sapiens
  misc_feature: 617 for SV(C|O) and mtDNA
catggttgttacttttatttggagttgcaccaaaatttttggggcctaagaccaatggatagctgttatcctttaaaagttgagaaagccatgttgttagacatgggggcatgagttagc

SEQ ID NO: 76330 - DNA, 120 bp, Homo sapiens; identical to SEQ ID NO: 59885
  misc_feature: 617 for SV(C|O) and mtDNA

SEQ ID NO: 76331 - DNA, 120 bp, Homo sapiens
  misc_feature: 617 for SV(C|O) and mtDNA
accttgtagagagagtaaaaaatttaacacccatagtaggcctaaaagcagccaccaattaagaaagcgttcaagctcaacacccactacctaaaaaatcccaaacatataactgaactc

SEQ ID NO: 76332 - DNA, 120 bp, Homo sapiens
  misc_feature: 617 for SV(C|O) and mtDNA
aaacaacataagcttctgactcttacctccctctctcctactcctgctcgcatctgctatagtggaggccggagcaggaacaggttgaacagtctaccctcccttagcagggaactactc

SEQ ID NO: 76333 - DNA, 120 bp, Homo sapiens
  misc_feature: 617 for SV(C|O) and mtDNA
gagatttggtatatgattgagatgggggctagtttttgtcatgtgagaagaagcaggccggatgtcagaggggtgccttgggtaacctctgggacccagaagtgaaagggggctattcct

SEQ ID NO: 76334 - DNA, 120 bp, Homo sapiens; identical to SEQ ID NO: 58067
  misc_feature: 617 for SV(C|O) and mtDNA

SEQ ID NO: 76335 - DNA, 120 bp, Homo sapiens; identical to SEQ ID NO: 60078
  misc_feature: 617 for SV(C|O) and mtDNA

SEQ ID NO: 76336 - DNA, 120 bp, Homo sapiens
  misc_feature: 617 for SV(C|O) and mtDNA
acctaagaacagctaaaagagcacacccgtctatgtagcaaaatagtgggaagatttataggtagaggcgacaaacctaccgagcctggtgatagctggttgtccaagatagaatcttag

SEQ ID NO: 76337 - DNA, 120 bp, Homo sapiens
  misc_feature: 617 for SV(C|O) and mtDNA
agaaagatgaatcctagggctcagagcactgcagcagatcatttcatattgcttccgtggagtgtggcgagtcagctaaatactttgacgccggtggggatagcgatgattatggtagcg

SEQ ID NO: 76338 - DNA, 120 bp, Homo sapiens; identical to SEQ ID NO: 57585
  misc_feature: 617 for SV(C|O) and mtDNA

SEQ ID NO: 76339 - DNA, 120 bp, Homo sapiens
  misc_feature: 617 for SV(C|O) and mtDNA
agggggtcggaggaaaaggttggggaacagctaaataggttgttgttgatttggttaaaaaatagtagagggatgatgctaataattaggctgtgggtggttgtgttgattcaaattatg

SEQ ID NO: 76340 - DNA, 120 bp, Homo sapiens
  misc_feature: 617 for SV(C|O) and mtDNA
cagtgctctgagccctaggattcatctttcttttcaccgtaggcggcctgactggcattgtattagcaaactcatcactagacatcgtactacacgacacgtactacgttgtagctcact

SEQ ID NO: 76341 - DNA, 120 bp, Homo sapiens
  misc_feature: 617 for SV(C|O) and mtDNA
agttttattgctatagccattatgattattaatgatgagtattgattggtagtattggttatggttcattgtccggagagtatattgttgaagaggatagctattagaaggattatggat

SEQ ID NO: 76342 - DNA, 120 bp, Homo sapiens; identical to SEQ ID NO: 62078
  misc_feature: 617 for SV(C|O) and mtDNA

SEQ ID NO: 76343 - DNA, 120 bp, Homo sapiens
  misc_feature: 617 for SV(C|O) and mtDNA
acaatccccctctacctaaaactcacagccctcgctgtcactttcctaggacttctaacagccctagacctcaactacctaaccaacaaacttaaaataaaatccccactatgcacattt

SEQ ID NO: 76344 - DNA, 120 bp, Homo sapiens; identical to SEQ ID NO: 52905
  misc_feature: 617 for SV(C|O) and mtDNA

SEQ ID NO: 76345 - DNA, 120 bp, Homo sapiens
  misc_feature: 617 for SV(C|O) and mtDNA
aacaatccccctctacctaaaactcacagccctcgctgtcactttcctaggacttctaacagccctagacctcaactacctaaccaacaaacttaaaataaaatccccactatgcacatt

SEQ ID NO: 76346 - DNA, 120 bp, Homo sapiens
  misc_feature: 616 for SV(C|O) and mtDNA
aggtggtgtgtggtggccttggtatgtgctttctcgtgttacatcgcgccatcattggtatatggttagtgtgttggttagtaggcctagtatgaggagcgttatggagtggaagtgaaa

SEQ ID NO: 76347 - DNA, 120 bp, Homo sapiens
  misc_feature: 616 for SV(C|O) and mtDNA
caactggcttcaatctacttctcccgccgccgggaaaaaaggcgggagaagccccggcaggtttgaagctgcttcttcgaatttgcaattcaatatgaaaatcacctcggagctggtaaa

SEQ ID NO: 76348 - DNA, 120 bp, Homo sapiens; identical to SEQ ID NO: 62467
  misc_feature: 616 for SV(C|O) and mtDNA

SEQ ID NO: 76349 - DNA, 120 bp, Homo sapiens
  misc_feature: 616 for SV(C|O) and mtDNA
tgggcgattgatgaaaaggcggttgaggcgtctggtgagtagtgcatggctaggaatagtcctgtggtgatttggaggatcaggcaggcgccaaggagtgagccgaagtttcatcatgcg

SEQ ID NO: 76350 - DNA, 120 bp, Homo sapiens; identical to SEQ ID NO: 56974
  misc_feature: 616 for SV(C|O) and mtDNA

SEQ ID NO: 76351 - DNA, 120 bp, Homo sapiens
  misc_feature: 616 for SV(C|O) and mtDNA
atcctcatcctagcaataatccccatcctccatatatccaaacaacaaagcataatatttcgcccactaagccaatcactttattgactcctagccgcagacctcctcattctaacctga

SEQ ID NO: 76352 - DNA, 120 bp, Homo sapiens; identical to SEQ ID NO: 58239
  misc_feature: 616 for SV(C|O) and mtDNA

SEQ ID NO: 76353 - DNA, 120 bp, Homo sapiens
  misc_feature: 616 for SV(C|O) and mtDNA
tagtcatgttagcttgtttcaggtgcgagatagtagtagggtcgtggtgctggagtttaagttgagtagtaggaatgcggtagtagttaggataatataaatagttaaattaagaatggt

SEQ ID NO: 76354 - DNA, 120 bp, Homo sapiens; identical to SEQ ID NO: 61040
  misc_feature: 616 for SV(C|O) and mtDNA

SEQ ID NO: 76355 - DNA, 120 bp, Homo sapiens
  misc_feature: 616 for SV(C|O) and mtDNA
taaccaatactaccaatcaatactcatcattaataatcataatggctatagcaataaaactaggaatagccccctttcacttctgggtcccagaggttacccaaggcacccctctgacat

SEQ ID NO: 76356 - DNA, 120 bp, Homo sapiens; identical to SEQ ID NO: 62329
  misc_feature: 616 for SV(C|O) and mtDNA

SEQ ID NO: 76357 - DNA, 120 bp, Homo sapiens
  misc_feature: 616 for SV(C|O) and mtDNA
gcagtgctctgagccctaggattcatctttcttttcaccgtaggcggcctgactggcattgtattagcaaactcatcactagacatcgtactacacgacacgtactacgttgtagctcac

SEQ ID NO: 76358 - DNA, 120 bp, Homo sapiens
  misc_feature: 616 for SV(C|O) and mtDNA
gtatcaatcacctgagctcaccatagtctaatagaaaacaaccgaaaccaaataattcaagcactgcttattacaattttactgggtctctattttaccctcctacaagcctcagagtac

SEQ ID NO: 76359 - DNA, 120 bp, Homo sapiens; identical to SEQ ID NO: 54888
  misc_feature: 616 for SV(C|O) and mtDNA

SEQ ID NO: 76360 - DNA, 120 bp, Homo sapiens
  misc_feature: 616 for SV(C|O) and mtDNA
gggtggcacccaaatctgcttccccatgaaagaacagagaatagtttaaattagaatcttagctttgggtgctaatggtggagttaaagactttttctctgatttgtccttggaaaaagg

SEQ ID NO: 76361 - DNA, 120 bp, Homo sapiens; identical to SEQ ID NO: 61927
  misc_feature: 616 for SV(C|O) and mtDNA

SEQ ID NO: 76362 - DNA, 120 bp, Homo sapiens; identical to SEQ ID NO: 59749
  misc_feature: 616 for SV(C|O) and mtDNA

SEQ ID NO: 76363 - DNA, 120 bp, Homo sapiens
  misc_feature: 616 for SV(C|O) and mtDNA
cattaacactattctcaccagacctcctaggcgacccagacaattataccctagccaaccccttaaacacccctccccacatcaagcccgaatgatatttcctattcgcctacacaattc

SEQ ID NO: 76364 - DNA, 120 bp, Homo sapiens; identical to SEQ ID NO: 53003
  misc_feature: 616 for SV(C|O) and mtDNA

SEQ ID NO: 76365 - DNA, 120 bp, Homo sapiens
  misc_feature: 616 for SV(C|O) and mtDNA
cccagtttgggtcttagctattgtgtgttcagatatgttaaagccactttcgtagtctattttgtgtcagctggagttttttacaactcaggtgagttttagctttattggggagggggt

SEQ ID NO: 76366 - DNA, 120 bp, Homo sapiens
  misc_feature: 616 for SV(C|O) and mtDNA
atcaggcaggcgccaaggagtgagccgaagtttcatcatgcggagatgttggatggggtggggaggtcgatgaatgagtggttaattaattttattagggggttaattttgcgtattggg

SEQ ID NO: 76367 - DNA, 120 bp, Homo sapiens
  misc_feature: 616 for SV(C|O) and mtDNA
ccatattgtaacttactactccggaaaaaaagaaccatttggatacataggtatggtctgagctatgatatcaattggcttcctagggtttatcgtgtgagcacaccatatatttacagt

SEQ ID NO: 76368 - DNA, 120 bp, Homo sapiens
  misc_feature: 616 for SV(C|O) and mtDNA
catcccatacattgggacagacctagttcaatgaatctgaggaggctactcagtagacagtcccaccctcacacgattctttacctttcacttcatcttgcccttcattattgcagccct

SEQ ID NO: 76369 - DNA, 120 bp, Homo sapiens
  misc_feature: 616 for SV(C|O) and mtDNA
ataagcttctgactcttacctccctctctcctactcctgctcgcatctgctatagtggaggccggagcaggaacaggttgaacagtctaccctcccttagcagggaactactcccaccct

SEQ ID NO: 76370 - DNA, 120 bp, Homo sapiens; identical to SEQ ID NO: 61313
  misc_feature: 616 for SV(C|O) and mtDNA

SEQ ID NO: 76371 - DNA, 120 bp, Homo sapiens; identical to SEQ ID NO: 63102
  misc_feature: 616 for SV(C|O) and mtDNA

SEQ ID NO: 76372 - DNA, 120 bp, Homo sapiens
  misc_feature: 615 for SV(C|O) and mtDNA
ttcctagtcctgtatgcccttttcctaacactcacaacaaaactaactaatactaacatctcagacgctcaggaaatagaaaccgtctgaactatcctgcccgccatcatcctagtcctc

SEQ ID NO: 76373 - DNA, 120 bp, Homo sapiens
  misc_feature: 615 for SV(C|O) and mtDNA
caggtggtgtgtggtggccttggtatgtgctttctcgtgttacatcgcgccatcattggtatatggttagtgtgttggttagtaggcctagtatgaggagcgttatggagtggaagtgaa

SEQ ID NO: 76374 - DNA, 120 bp, Homo sapiens
  misc_feature: 615 for SV(C|O) and mtDNA
aagaacagctaaaagagcacacccgtctatgtagcaaaatagtgggaagatttataggtagaggcgacaaacctaccgagcctggtgatagctggttgtccaagatagaatcttagttca

SEQ ID NO: 76375 - DNA, 120 bp, Homo sapiens
  misc_feature: 615 for SV(C|O) and mtDNA
cctttttgggttgaggtgatgatggaggtggagatttggtgctgtgaaattgttttaggtaatagcttttctagtcaggttaggtctaggaggagtaggggcaggttttggctcgtaaga

SEQ ID NO: 76376 - DNA, 120 bp, Homo sapiens
  misc_feature: 615 for SV(C|O) and mtDNA
tcctacttacaggactcaacatactagtcacagccctatactccctctacatatttaccacaacacaatggggctcactcacccaccacattaacaacataaaaccctcattcacacgag

SEQ ID NO: 76377 - DNA, 120 bp, Homo sapiens
  misc_feature: 615 for SV(C|O) and mtDNA
tccatcctcatcctagcaataatccccatcctccatatatccaaacaacaaagcataatatttcgcccactaagccaatcactttattgactcctagccgcagacctcctcattctaacc

SEQ ID NO: 76378 - DNA, 120 bp, Homo sapiens
  misc_feature: 615 for SV(C|O) and mtDNA
gtaacttactactccggaaaaaaagaaccatttggatacataggtatggtctgagctatgatatcaattggcttcctagggtttatcgtgtgagcacaccatatatttacagtaggaata

SEQ ID NO: 76379 - DNA, 120 bp, Homo sapiens
  misc_feature: 615 for SV(C|O) and mtDNA
tagggggtcggaggaaaaggttggggaacagctaaataggttgttgttgatttggttaaaaaatagtagagggatgatgctaataattaggctgtgggtggttgtgttgattcaaattat

SEQ ID NO: 76380 - DNA, 120 bp, Homo sapiens
  misc_feature: 615 for SV(C|O) and mtDNA
atcaactggcttcaatctacttctcccgccgccgggaaaaaaggcgggagaagccccggcaggtttgaagctgcttcttcgaatttgcaattcaatatgaaaatcacctcggagctggta

SEQ ID NO: 76381 - DNA, 120 bp, Homo sapiens; identical to SEQ ID NO: 57723
  misc_feature: 615 for SV(C|O) and mtDNA

SEQ ID NO: 76382 - DNA, 120 bp, Homo sapiens
  misc_feature: 615 for SV(C|O) and mtDNA
gtcctaatagtagaagaaccctccataaacctggagtgactatatggatgccccccaccctaccacacattcgaagaacccgtatacataaaatctagacaaaaaaggaaggaatcgaac

SEQ ID NO: 76383 - DNA, 120 bp, Homo sapiens; identical to SEQ ID NO: 59200
  misc_feature: 615 for SV(C|O) and mtDNA

SEQ ID NO: 76384 - DNA, 120 bp, Homo sapiens
  misc_feature: 615 for SV(C|O) and mtDNA
ctttggggggttcgattccttccttttttgtctagattttatgtatacgggttcttcgaatgtgtggtagggtggggggcatccatatagtcactccaggtttatggagggttcttctac

SEQ ID NO: 76385 - DNA, 120 bp, Homo sapiens
  misc_feature: 615 for SV(C|O) and mtDNA
aatggattttacataatgggggtatgagttttttttgttagggttaacgagggtggtaaggatggggggaattagggaagtcagggttagggtggttatagtagtgtgcatggttgttac

SEQ ID NO: 76386 - DNA, 120 bp, Homo sapiens
  misc_feature: 615 for SV(C|O) and mtDNA
gggtggttgtgttgattcaaattatgtgttttttggaaagtcatgtcagtggtagtaatataattgttgggacgattagttttagcattggagtaggtttaggttatgtacgtagtctag

SEQ ID NO: 76387 - DNA, 120 bp, Homo sapiens
  misc_feature: 615 for SV(C|O) and mtDNA
ggctttctcaacttttaaaggataacagctatccattggtcttaggccccaaaaattttggtgcaactccaaataaaagtaacaaccatgcacactactataaccaccctaaccctgact

SEQ ID NO: 76388 - DNA, 120 bp, Homo sapiens; identical to SEQ ID NO: 60034
  misc_feature: 615 for SV(C|O) and mtDNA

SEQ ID NO: 76389 - DNA, 120 bp, Homo sapiens; identical to SEQ ID NO: 62072
  misc_feature: 615 for SV(C|O) and mtDNA

SEQ ID NO: 76390 - DNA, 120 bp, Homo sapiens
  misc_feature: 615 for SV(C|O) and mtDNA
aatagccccctttcacttctgggtcccagaggttacccaaggcacccctctgacatccggcctgcttcttctcacatgacaaaaactagcccccatctcaatcatataccaaatctctcc

SEQ ID NO: 76391 - DNA, 120 bp, Homo sapiens
  misc_feature: 615 for SV(C|O) and mtDNA
gcttcctagtcctgtatgcccttttcctaacactcacaacaaaactaactaatactaacatctcagacgctcaggaaatagaaaccgtctgaactatcctgcccgccatcatcctagtcc

SEQ ID NO: 76392 - DNA, 120 bp, Homo sapiens; identical to SEQ ID NO: 60419
  misc_feature: 615 for SV(C|O) and mtDNA

SEQ ID NO: 76393 - DNA, 120 bp, Homo sapiens
  misc_feature: 615 for SV(C|O) and mtDNA
gaaagatgaatcctagggctcagagcactgcagcagatcatttcatattgcttccgtggagtgtggcgagtcagctaaatactttgacgccggtggggatagcgatgattatggtagcgg

SEQ ID NO: 76394 - DNA, 120 bp, Homo sapiens
  misc_feature: 615 for SV(C|O) and mtDNA
cactgttcattatagctactctcataaccctcaacacccactccctcttagccaatattgtgcctattgccatactagtctttgccgcctgcgaagcagcggtgggcctagccctactag

SEQ ID NO: 76395 - DNA, 120 bp, Homo sapiens; identical to SEQ ID NO: 58156
  misc_feature: 615 for SV(C|O) and mtDNA

SEQ ID NO: 76396 - DNA, 120 bp, Homo sapiens
  misc_feature: 615 for SV(C|O) and mtDNA
cctatcatctgtaggctcattcatttctctaacagcagtaatattaataattttcatgatttgagaagccttcgcttcgaagcgaaaagtcctaatagtagaagaaccctccataaacct

SEQ ID NO: 76397 - DNA, 120 bp, Homo sapiens
  misc_feature: 615 for SV(C|O) and mtDNA
atgcttaggcgctatcaccactctgttcgcagcagtctgcgcccttacacaaaatgacatcaaaaaaatcgtagccttctccacttcaagtcaactaggactcataatagttacaatcgg

SEQ ID NO: 76398 - DNA, 120 bp, Homo sapiens
  misc_feature: 615 for SV(C|O) and mtDNA
catagcctaccccttccttgtactatccctatgaggcataattataacaagctccatctgcctacgacaaacagacctaaaatcgctcattgcatactcttcaatcagccacatagccct

SEQ ID NO: 76399 - DNA, 120 bp, Homo sapiens
  misc_feature: 615 for SV(C|O) and mtDNA
caccctaaccctgacttccctaattccccccatccttaccaccctcgttaaccctaacaaaaaaaactcatacccccattatgtaaaatccattgtcgcatccacctttattatcagtct

SEQ ID NO: 76400 - DNA, 120 bp, Homo sapiens
  misc_feature: 615 for SV(C|O) and mtDNA
accgctcacacctcatatcctccctactatgcctagaaggaataatactatcactgttcattatagctactctcataaccctcaacacccactccctcttagccaatattgtgcctattg

SEQ ID NO: 76401 - DNA, 120 bp, Homo sapiens
  misc_feature: 615 for SV(C|O) and mtDNA
agtttaccacaaccaccaccccatcatactctttcacccacagcaccaatcctacctccatcgctaaccccactaaaacactcaccaagacctcaacccctgacccccatgcctcaggat

SEQ ID NO: 76402 - DNA, 120 bp, Homo sapiens
  misc_feature: 615 for SV(C|O) and mtDNA
atatgctcgtgtgtctacgtctattcctactgtaaatatatggtgtgctcacacgataaaccctaggaagccaattgatatcatagctcagaccatacctatgtatccaaatggttcttt

SEQ ID NO: 76403 - DNA, 120 bp, Homo sapiens; identical to SEQ ID NO: 60449
  misc_feature: 614 for SV(C|O) and mtDNA

SEQ ID NO: 76404 - DNA, 120 bp, Homo sapiens; identical to SEQ ID NO: 56396
  misc_feature: 614 for SV(C|O) and mtDNA

SEQ ID NO: 76405 - DNA, 120 bp, Homo sapiens
  misc_feature: 614 for SV(C|O) and mtDNA
ccatgttacgacttgtctcctctatataaatgcgtaggggttttagttaaatgtcctttgaagtatacttgaggagggtgacgggcggtgtgtacgcgcttcagggccctgttcaactaa

SEQ ID NO: 76406 - DNA, 120 bp, Homo sapiens
  misc_feature: 614 for SV(C|O) and mtDNA
ctccggacaatgaaccataaccaatactaccaatcaatactcatcattaataatcataatggctatagcaataaaactaggaatagccccctttcacttctgggtcccagaggttaccca

SEQ ID NO: 76407 - DNA, 120 bp, Homo sapiens
  misc_feature: 614 for SV(C|O) and mtDNA
cgttgactattctctacaaaccacaaagacattggaacactatacctattattcggcgcatgagctggagtcctaggcacagctctaagcctccttattcgagccgagctgggccagcca

SEQ ID NO: 76408 - DNA, 120 bp, Homo sapiens
  misc_feature: 614 for SV(C|O) and mtDNA
aaccgtctgaactatcctgcccgccatcatcctagtcctcatcgccctcccatccctgcgcatcctttacataacagacgaggtcaacgatccctcccttaccatcaaatcaattggcca

SEQ ID NO: 76409 - DNA, 120 bp, Homo sapiens
  misc_feature: 614 for SV(C|O) and mtDNA
tggattttacataatgggggtatgagttttttttgttagggttaacgagggtggtaaggatggggggaattagggaagtcagggttagggtggttatagtagtgtgcatggttgttactt

SEQ ID NO: 76410 - DNA, 120 bp, Homo sapiens
  misc_feature: 614 for SV(C|O) and mtDNA
gctctgagccctaggattcatctttcttttcaccgtaggcggcctgactggcattgtattagcaaactcatcactagacatcgtactacacgacacgtactacgttgtagctcacttcca

SEQ ID NO: 76411 - DNA, 120 bp, Homo sapiens
  misc_feature: 614 for SV(C|O) and mtDNA
gggtttttatgtactacaggtggtcaagtatttatggtaccgtacaatattcatggtggctggcagtaatgtacgaattacatagcggttgttgatgggtgagtcaatacttgggtggca

SEQ ID NO: 76412 - DNA, 120 bp, Homo sapiens
  misc_feature: 614 for SV(C|O) and mtDNA
tcctagtcctgtatgcccttttcctaacactcacaacaaaactaactaatactaacatctcagacgctcaggaaatagaaaccgtctgaactatcctgcccgccatcatcctagtcctca

SEQ ID NO: 76413 - DNA, 120 bp, Homo sapiens; identical to SEQ ID NO: 53393
  misc_feature: 614 for SV(C|O) and mtDNA

SEQ ID NO: 76414 - DNA, 120 bp, Homo sapiens
  misc_feature: 614 for SV(C|O) and mtDNA
tatctacttcaaattcctccctgtacgaaaggacaagagaaataaggcctacttcacaaagcgccttcccccgtaaatgatatcatctcaacttagtattatacccacacccacccaaga

SEQ ID NO: 76415 - DNA, 120 bp, Homo sapiens; identical to SEQ ID NO: 58054
  misc_feature: 614 for SV(C|O) and mtDNA

SEQ ID NO: 76416 - DNA, 120 bp, Homo sapiens
  misc_feature: 614 for SV(C|O) and mtDNA
tctcaggctacaccctagaccaaacctacgccaaaatccatttcactatcatattcatcggcgtaaatctaactttcttcccacaacactttctcggcctatccggaatgccccgacgtt

SEQ ID NO: 76417 - DNA, 120 bp, Homo sapiens; identical to SEQ ID NO: 62080
  misc_feature: 614 for SV(C|O) and mtDNA

SEQ ID NO: 76418 - DNA, 120 bp, Homo sapiens; identical to SEQ ID NO: 59983
  misc_feature: 614 for SV(C|O) and mtDNA

SEQ ID NO: 76419 - DNA, 120 bp, Homo sapiens
  misc_feature: 614 for SV(C|O) and mtDNA
ctatccatcctcatcctagcaataatccccatcctccatatatccaaacaacaaagcataatatttcgcccactaagccaatcactttattgactcctagccgcagacctcctcattcta

SEQ ID NO: 76420 - DNA, 120 bp, Homo sapiens
  misc_feature: 614 for SV(C|O) and mtDNA
taccgcaagggaaagatgaaaaattataaccaagcataatacagcaaggactaacccctataccttctgcataatgaattaactagaaataactttgcaaggagagccaaagctaagacc

SEQ ID NO: 76421 - DNA, 120 bp, Homo sapiens
  misc_feature: 614 for SV(C|O) and mtDNA
ggtttttatgtactacaggtggtcaagtatttatggtaccgtacaatattcatggtggctggcagtaatgtacgaattacatagcggttgttgatgggtgagtcaatacttgggtggcac

SEQ ID NO: 76422 - DNA, 120 bp, Homo sapiens
  misc_feature: 614 for SV(C|O) and mtDNA
cactctcctacttacaggactcaacatactagtcacagccctatactccctctacatatttaccacaacacaatggggctcactcacccaccacattaacaacataaaaccctcattcac

SEQ ID NO: 76423 - DNA, 120 bp, Homo sapiens
  misc_feature: 614 for SV(C|O) and mtDNA
gccctcgtagtaacagccattctcatccaaaccccctgaagcttcaccggcgcagtcattctcataatcgcccacggacttacatcctcattactattctgcctagcaaactcaaactac

SEQ ID NO: 76424 - DNA, 120 bp, Homo sapiens
  misc_feature: 614 for SV(C|O) and mtDNA
gtagtgtgcatggttgttacttttatttggagttgcaccaaaatttttggggcctaagaccaatggatagctgttatcctttaaaagttgagaaagccatgttgttagacatgggggcat

SEQ ID NO: 76425 - DNA, 120 bp, Homo sapiens
  misc_feature: 614 for SV(C|O) and mtDNA
ggtggcacccaaatctgcttccccatgaaagaacagagaatagtttaaattagaatcttagctttgggtgctaatggtggagttaaagactttttctctgatttgtccttggaaaaaggt

SEQ ID NO: 76426 - DNA, 120 bp, Homo sapiens
  misc_feature: 614 for SV(C|O) and mtDNA
ccatcaccctccttaacctctacttctacctacgcctaatctactccacctcaatcacactactccccatatctaacaacgtaaaaataaaatgacagtttgaacatacaaaacccaccc

SEQ ID NO: 76427 - DNA, 120 bp, Homo sapiens
  misc_feature: 614 for SV(C|O) and mtDNA
aacttaaaataaaatccccactatgcacattttatttctccaacatactcggattctaccctaccatcacacaccgcacaatcccctatctaggccttcttacgagccaaaacctgcccc

SEQ ID NO: 76428 - DNA, 120 bp, Homo sapiens
  misc_feature: 614 for SV(C|O) and mtDNA
agattaaaaatgccctagcccacttcttaccacaaggcacacctacaccccttatccccatactagttattatcgaaaccatcagcctactcattcaaccaatagccctggccgtacgcc

SEQ ID NO: 76429 - DNA, 120 bp, Homo sapiens; identical to SEQ ID NO: 57874
  misc_feature: 614 for SV(C|O) and mtDNA

SEQ ID NO: 76430 - DNA, 120 bp, Homo sapiens; identical to SEQ ID NO: 62272
  misc_feature: 614 for SV(C|O) and mtDNA

SEQ ID NO: 76431 - DNA, 120 bp, Homo sapiens
  misc_feature: 614 for SV(C|O) and mtDNA
gcattgtattagcaaactcatcactagacatcgtactacacgacacgtactacgttgtagctcacttccactatgtcctatcaataggagctgtatttgccatcataggaggcttcattc

SEQ ID NO: 76432 - DNA, 120 bp, Homo sapiens
  misc_feature: 614 for SV(C|O) and mtDNA
gattagtgggctattttctgctagggggtggaagcggatgagtaagaagattcctgctacaactatagtgcttgagtggagtagggctgagactggggtggggccttctatggctgaggg

SEQ ID NO: 76433 - DNA, 120 bp, Homo sapiens; identical to SEQ ID NO: 62375
  misc_feature: 614 for SV(C|O) and mtDNA

SEQ ID NO: 76434 - DNA, 120 bp, Homo sapiens
  misc_feature: 614 for SV(C|O) and mtDNA
atctactccacctcaatcacactactccccatatctaacaacgtaaaaataaaatgacagtttgaacatacaaaacccaccccattcctccccacactcatcgcccttaccacgctactc

SEQ ID NO: 76435 - DNA, 120 bp, Homo sapiens
  misc_feature: 614 for SV(C|O) and mtDNA
accctaaccctgacttccctaattccccccatccttaccaccctcgttaaccctaacaaaaaaaactcatacccccattatgtaaaatccattgtcgcatccacctttattatcagtctc

SEQ ID NO: 76436 - DNA, 120 bp, Homo sapiens
  misc_feature: 614 for SV(C|O) and mtDNA
attagtgggctattttctgctagggggtggaagcggatgagtaagaagattcctgctacaactatagtgcttgagtggagtagggctgagactggggtggggccttctatggctgagggg

SEQ ID NO: 76437 - DNA, 120 bp, Homo sapiens
  misc_feature: 614 for SV(C|O) and mtDNA
caaaaagccggttagcgggggcaggcctcctagggagaggagggtggatggaattaagggtgttagtcatgttagcttgtttcaggtgcgagatagtagtagggtcgtggtgctggagtt

SEQ ID NO: 76438 - DNA, 120 bp, Homo sapiens
  misc_feature: 614 for SV(C|O) and mtDNA
aaccttgtagagagagtaaaaaatttaacacccatagtaggcctaaaagcagccaccaattaagaaagcgttcaagctcaacacccactacctaaaaaatcccaaacatataactgaact

SEQ ID NO: 76439 - DNA, 120 bp, Homo sapiens; identical to SEQ ID NO: 62541
  misc_feature: 614 for SV(C|O) and mtDNA

SEQ ID NO: 76440 - DNA, 120 bp, Homo sapiens
  misc_feature: 614 for SV(C|O) and mtDNA
aaatatgctcgtgtgtctacgtctattcctactgtaaatatatggtgtgctcacacgataaaccctaggaagccaattgatatcatagctcagaccatacctatgtatccaaatggttct

SEQ ID NO: 76441 - DNA, 120 bp, Homo sapiens; identical to SEQ ID NO: 60120
  misc_feature: 613 for SV(C|O) and mtDNA

SEQ ID NO: 76442 - DNA, 120 bp, Homo sapiens
  misc_feature: 613 for SV(C|O) and mtDNA
agtagaagaaccctccataaacctggagtgactatatggatgccccccaccctaccacacattcgaagaacccgtatacataaaatctagacaaaaaaggaaggaatcgaaccccccaaa

SEQ ID NO: 76443 - DNA, 120 bp, Homo sapiens; identical to SEQ ID NO: 54463
  misc_feature: 613 for SV(C|O) and mtDNA

SEQ ID NO: 76444 - DNA, 120 bp, Homo sapiens
  misc_feature: 613 for SV(C|O) and mtDNA
tggataagtggcgttggcttgccatgattgtgaggggtaggagtcaggtagttagtattaggaggggggttgttagggggtcggaggaaaaggttggggaacagctaaataggttgttgt

SEQ ID NO: 76445 - DNA, 120 bp, Homo sapiens; identical to SEQ ID NO: 54117
  misc_feature: 613 for SV(C|O) and mtDNA

SEQ ID NO: 76446 - DNA, 120 bp, Homo sapiens
  misc_feature: 613 for SV(C|O) and mtDNA
tctcccgccgccgggaaaaaaggcgggagaagccccggcaggtttgaagctgcttcttcgaatttgcaattcaatatgaaaatcacctcggagctggtaaaaagaggcctaacccctgtc

SEQ ID NO: 76447 - DNA, 120 bp, Homo sapiens
  misc_feature: 613 for SV(C|O) and mtDNA
ctagcaataatccccatcctccatatatccaaacaacaaagcataatatttcgcccactaagccaatcactttattgactcctagccgcagacctcctcattctaacctgaatcggagga

SEQ ID NO: 76448 - DNA, 120 bp, Homo sapiens
  misc_feature: 613 for SV(C|O) and mtDNA
tcaggcggcggcttcgaagccaaagtgatgtttggatgtaaagtgaaatattagttggcggatgaagcagatagtgaggaaagttgagccaataatgacgtgaagtccgtggaagcctgt

SEQ ID NO: 76449 - DNA, 120 bp, Homo sapiens
  misc_feature: 613 for SV(C|O) and mtDNA
tatgctcgtgtgtctacgtctattcctactgtaaatatatggtgtgctcacacgataaaccctaggaagccaattgatatcatagctcagaccatacctatgtatccaaatggttctttt

SEQ ID NO: 76450 - DNA, 120 bp, Homo sapiens
  misc_feature: 613 for SV(C|O) and mtDNA
taggacttttcgcttcgaagcgaaggcttctcaaatcatgaaaattattaatattactgctgttagagaaatgaatgagcctacagatgataggatgtttcatgtggtgtatgcatcggg

SEQ ID NO: 76451 - DNA, 120 bp, Homo sapiens
  misc_feature: 613 for SV(C|O) and mtDNA
tagccaaggtggggataagtgtggtttcgaagaagatataaaatatgattagttctgtggctgtgaatgttataattaaggagatttgtagggagattagtatagagaggtagagttttt

SEQ ID NO: 76452 - DNA, 120 bp, Homo sapiens
  misc_feature: 613 for SV(C|O) and mtDNA
gctttggggggttcgattccttccttttttgtctagattttatgtatacgggttcttcgaatgtgtggtagggtggggggcatccatatagtcactccaggtttatggagggttcttcta

SEQ ID NO: 76453 - DNA, 120 bp, Homo sapiens
  misc_feature: 613 for SV(C|O) and mtDNA
gttttattgctatagccattatgattattaatgatgagtattgattggtagtattggttatggttcattgtccggagagtatattgttgaagaggatagctattagaaggattatggatg

SEQ ID NO: 76454 - DNA, 120 bp, Homo sapiens
  misc_feature: 613 for SV(C|O) and mtDNA
gggttaggcctctttttaccagctccgaggtgattttcatattgaattgcaaattcgaagaagcagcttcaaacctgccggggcttctcccgccttttttcccggcggcgggagaagtag

SEQ ID NO: 76455 - DNA, 120 bp, Homo sapiens
  misc_feature: 613 for SV(C|O) and mtDNA
cccctcacccactaggataccaacaaacctactcacccttaacagcacatagtacataaagccatttaccgtacatagcacattacagtcaaatcccttctcgtccccatggatgacccc

SEQ ID NO: 76456 - DNA, 120 bp, Homo sapiens
  misc_feature: 613 for SV(C|O) and mtDNA
gcatggttgttacttttatttggagttgcaccaaaatttttggggcctaagaccaatggatagctgttatcctttaaaagttgagaaagccatgttgttagacatgggggcatgagttag

SEQ ID NO: 76457 - DNA, 120 bp, Homo sapiens; identical to SEQ ID NO: 58033
  misc_feature: 613 for SV(C|O) and mtDNA

SEQ ID NO: 76458 - DNA, 120 bp, Homo sapiens
  misc_feature: 613 for SV(C|O) and mtDNA
actatagttgtagcaggaatcttcttactcatccgcttccaccccctagcagaaaatagcccactaatccaaactctaacactatgcttaggcgctatcaccactctgttcgcagcagtc

SEQ ID NO: 76459 - DNA, 120 bp, Homo sapiens
  misc_feature: 613 for SV(C|O) and mtDNA
ccccactgatgttcgccgaccgttgactattctctacaaaccacaaagacattggaacactatacctattattcggcgcatgagctggagtcctaggcacagctctaagcctccttattc

SEQ ID NO: 76460 - DNA, 120 bp, Homo sapiens
  misc_feature: 613 for SV(C|O) and mtDNA
ctagttttattgctatagccattatgattattaatgatgagtattgattggtagtattggttatggttcattgtccggagagtatattgttgaagaggatagctattagaaggattatgg

SEQ ID NO: 76461 - DNA, 120 bp, Homo sapiens
  misc_feature: 613 for SV(C|O) and mtDNA
cgtccccatggatgacccccctcagataggggtcccttgaccaccatcctccgtgaaatcaatatcccgcacaagagtgctactctcctcgctccgggcccataacacttgggggtagct

SEQ ID NO: 76462 - DNA, 120 bp, Homo sapiens; identical to SEQ ID NO: 56996
  misc_feature: 613 for SV(C|O) and mtDNA

SEQ ID NO: 76463 - DNA, 120 bp, Homo sapiens
  misc_feature: 613 for SV(C|O) and mtDNA
ccatcctcatcctagcaataatccccatcctccatatatccaaacaacaaagcataatatttcgcccactaagccaatcactttattgactcctagccgcagacctcctcattctaacct

SEQ ID NO: 76464 - DNA, 120 bp, Homo sapiens
  misc_feature: 613 for SV(C|O) and mtDNA
ccagtttgggtcttagctattgtgtgttcagatatgttaaagccactttcgtagtctattttgtgtcagctggagttttttacaactcaggtgagttttagctttattggggagggggtg

SEQ ID NO: 76465 - DNA, 120 bp, Homo sapiens
  misc_feature: 613 for SV(C|O) and mtDNA
cactggataagtggcgttggcttgccatgattgtgaggggtaggagtcaggtagttagtattaggaggggggttgttagggggtcggaggaaaaggttggggaacagctaaataggttgt

SEQ ID NO: 76466 - DNA, 120 bp, Homo sapiens
  misc_feature: 613 for SV(C|O) and mtDNA
aatagaaaccgtctgaactatcctgcccgccatcatcctagtcctcatcgccctcccatccctgcgcatcctttacataacagacgaggtcaacgatccctcccttaccatcaaatcaat

SEQ ID NO: 76467 - DNA, 120 bp, Homo sapiens; identical to SEQ ID NO: 62371
  misc_feature: 613 for SV(C|O) and mtDNA

SEQ ID NO: 76468 - DNA, 120 bp, Homo sapiens; identical to SEQ ID NO: 62013
  misc_feature: 613 for SV(C|O) and mtDNA

SEQ ID NO: 76469 - DNA, 120 bp, Homo sapiens
  misc_feature: 613 for SV(C|O) and mtDNA
agaaccaggcgacctgcgactccttgacgttgacaatcgagtagtactcccgattgaagcccccattcgtataataattacatcacaagacgtcttgcactcatgagctgtccccacatt

SEQ ID NO: 76470 - DNA, 120 bp, Homo sapiens
  misc_feature: 613 for SV(C|O) and mtDNA
acattaacactattctcaccagacctcctaggcgacccagacaattataccctagccaaccccttaaacacccctccccacatcaagcccgaatgatatttcctattcgcctacacaatt

SEQ ID NO: 76471 - DNA, 120 bp, Homo sapiens
  misc_feature: 612 for SV(C|O) and mtDNA
acacaaaatagactacgaaagtggctttaacatatctgaacacacaatagctaagacccaaactgggattagataccccactatgcttagccctaaacctcaacagttaaatcaacaaaa

SEQ ID NO: 76472 - DNA, 120 bp, Homo sapiens
  misc_feature: 612 for SV(C|O) and mtDNA
tccggacaatgaaccataaccaatactaccaatcaatactcatcattaataatcataatggctatagcaataaaactaggaatagccccctttcacttctgggtcccagaggttacccaa

SEQ ID NO: 76473 - DNA, 120 bp, Homo sapiens
  misc_feature: 612 for SV(C|O) and mtDNA
agaacagctaaaagagcacacccgtctatgtagcaaaatagtgggaagatttataggtagaggcgacaaacctaccgagcctggtgatagctggttgtccaagatagaatcttagttcaa

SEQ ID NO: 76474 - DNA, 120 bp, Homo sapiens; identical to SEQ ID NO: 56564
  misc_feature: 612 for SV(C|O) and mtDNA

SEQ ID NO: 76475 - DNA, 120 bp, Homo sapiens
  misc_feature: 612 for SV(C|O) and mtDNA
ttcaactacaagaacaccaatgaccccaatacgcaaaattaaccccctaataaaattaattaaccactcattcatcgacctccccaccccatccaacatctccgcatgatgaaacttcgg

SEQ ID NO: 76476 - DNA, 120 bp, Homo sapiens; identical to SEQ ID NO: 54916
  misc_feature: 612 for SV(C|O) and mtDNA

SEQ ID NO: 76477 - DNA, 120 bp, Homo sapiens
  misc_feature: 612 for SV(C|O) and mtDNA
ttacaggactcaacatactagtcacagccctatactccctctacatatttaccacaacacaatggggctcactcacccaccacattaacaacataaaaccctcattcacacgagaaaaca

SEQ ID NO: 76478 - DNA, 120 bp, Homo sapiens
  misc_feature: 612 for SV(C|O) and mtDNA
caatcctatacaaccgtatcggcgatatcggtttcatcctcgccttagcatgatttatcctacactccaactcatgagacccacaacaaatagcccttctaaacgctaatccaagcctca

SEQ ID NO: 76479 - DNA, 120 bp, Homo sapiens; identical to SEQ ID NO: 60997
  misc_feature: 612 for SV(C|O) and mtDNA

SEQ ID NO: 76480 - DNA, 120 bp, Homo sapiens
  misc_feature: 612 for SV(C|O) and mtDNA
tcactctcctacttacaggactcaacatactagtcacagccctatactccctctacatatttaccacaacacaatggggctcactcacccaccacattaacaacataaaaccctcattca

SEQ ID NO: 76481 - DNA, 120 bp, Homo sapiens
  misc_feature: 612 for SV(C|O) and mtDNA
taaatatatggtgtgctcacacgataaaccctaggaagccaattgatatcatagctcagaccatacctatgtatccaaatggttctttttttccggagtagtaagttacaatatgggaga

SEQ ID NO: 76482 - DNA, 120 bp, Homo sapiens
  misc_feature: 612 for SV(C|O) and mtDNA
ataagtggcgttggcttgccatgattgtgaggggtaggagtcaggtagttagtattaggaggggggttgttagggggtcggaggaaaaggttggggaacagctaaataggttgttgttga

SEQ ID NO: 76483 - DNA, 120 bp, Homo sapiens; identical to SEQ ID NO: 52684
  misc_feature: 612 for SV(C|O) and mtDNA

SEQ ID NO: 76484 - DNA, 120 bp, Homo sapiens; identical to SEQ ID NO: 60441
  misc_feature: 612 for SV(C|O) and mtDNA

SEQ ID NO: 76485 - DNA, 120 bp, Homo sapiens
  misc_feature: 612 for SV(C|O) and mtDNA
tagctgactcgccacactccacggaagcaatatgaaatgatctgctgcagtgctctgagccctaggattcatctttcttttcaccgtaggcggcctgactggcattgtattagcaaactc

SEQ ID NO: 76486 - DNA, 120 bp, Homo sapiens
  misc_feature: 612 for SV(C|O) and mtDNA
tagaaccaggcgacctgcgactccttgacgttgacaatcgagtagtactcccgattgaagcccccattcgtataataattacatcacaagacgtcttgcactcatgagctgtccccacat

SEQ ID NO: 76487 - DNA, 120 bp, Homo sapiens
  misc_feature: 612 for SV(C|O) and mtDNA
tacagaaattaagtattgcaacttactgagggctttgaaggctcttggtctgtatttaacctaaatttctataagattattagtataaaaggggagataggtaggagtagcgtggtaagg

SEQ ID NO: 76488 - DNA, 120 bp, Homo sapiens
  misc_feature: 612 for SV(C|O) and mtDNA
taagtggcgttggcttgccatgattgtgaggggtaggagtcaggtagttagtattaggaggggggttgttagggggtcggaggaaaaggttggggaacagctaaataggttgttgttgat

SEQ ID NO: 76489 - DNA, 120 bp, Homo sapiens
  misc_feature: 612 for SV(C|O) and mtDNA
cactcaccaagacctcaacccctgacccccatgcctcaggatactcctcaatagccatcgctgtagtatatccaaagacaaccatcattccccctaaataaattaaaaaaactattaaac

SEQ ID NO: 76490 - DNA, 120 bp, Homo sapiens
  misc_feature: 612 for SV(C|O) and mtDNA
gtgctcacacgataaaccctaggaagccaattgatatcatagctcagaccatacctatgtatccaaatggttctttttttccggagtagtaagttacaatatgggagattattccgaagc

SEQ ID NO: 76491 - DNA, 120 bp, Homo sapiens
  misc_feature: 612 for SV(C|O) and mtDNA
cccccgcccgcgtccctttctccataaaattcttcttagtagctattaccttcttattatttgatctagaaattgccctccttttacccctaccatgagccctacaaacaactaacctac

SEQ ID NO: 76492 - DNA, 120 bp, Homo sapiens
  misc_feature: 612 for SV(C|O) and mtDNA
ggttgttacttttatttggagttgcaccaaaatttttggggcctaagaccaatggatagctgttatcctttaaaagttgagaaagccatgttgttagacatgggggcatgagttagcagt

SEQ ID NO: 76493 - DNA, 120 bp, Homo sapiens; identical to SEQ ID NO: 62221
  misc_feature: 612 for SV(C|O) and mtDNA

SEQ ID NO: 76494 - DNA, 120 bp, Homo sapiens; identical to SEQ ID NO: 62244
  misc_feature: 612 for SV(C|O) and mtDNA

SEQ ID NO: 76495 - DNA, 120 bp, Homo sapiens; identical to SEQ ID NO: 57018
  misc_feature: 612 for SV(C|O) and mtDNA

SEQ ID NO: 76496 - DNA, 120 bp, Homo sapiens
  misc_feature: 612 for SV(C|O) and mtDNA
agcagccattcaagcaatcctatacaaccgtatcggcgatatcggtttcatcctcgccttagcatgatttatcctacactccaactcatgagacccacaacaaatagcccttctaaacgc

SEQ ID NO: 76497 - DNA, 120 bp, Homo sapiens
  misc_feature: 612 for SV(C|O) and mtDNA
gcctttttgggttgaggtgatgatggaggtggagatttggtgctgtgaaattgttttaggtaatagcttttctagtcaggttaggtctaggaggagtaggggcaggttttggctcgtaag

SEQ ID NO: 76498 - DNA, 120 bp, Homo sapiens
  misc_feature: 612 for SV(C|O) and mtDNA
gaatagccccctttcacttctgggtcccagaggttacccaaggcacccctctgacatccggcctgcttcttctcacatgacaaaaactagcccccatctcaatcatataccaaatctctc

SEQ ID NO: 76499 - DNA, 120 bp, Homo sapiens
  misc_feature: 612 for SV(C|O) and mtDNA
gacaatggattttacataatgggggtatgagttttttttgttagggttaacgagggtggtaaggatggggggaattagggaagtcagggttagggtggttatagtagtgtgcatggttgt

SEQ ID NO: 76500 - DNA, 120 bp, Homo sapiens
  misc_feature: 612 for SV(C|O) and mtDNA
cttgggcagtgagagtgagtagtagaatgtttagtgagcctagggtgttgtgagtgtaaattagtgcgatgagtaggggaagggagcctactagggtgtagaataggaagtatgtgcctg

SEQ ID NO: 76501 - DNA, 120 bp, Homo sapiens
  misc_feature: 612 for SV(C|O) and mtDNA
cttcctagtcctgtatgcccttttcctaacactcacaacaaaactaactaatactaacatctcagacgctcaggaaatagaaaccgtctgaactatcctgcccgccatcatcctagtcct

SEQ ID NO: 76502 - DNA, 120 bp, Homo sapiens
  misc_feature: 612 for SV(C|O) and mtDNA
cctaacgtctttacgtgggtacttgcgcttactttgtagccttcatcagggtttgctgaagatggcggtatataggctgagcaagaggtggtgaggttgatcggggtttatcgattacag

SEQ ID NO: 76503 - DNA, 120 bp, Homo sapiens
  misc_feature: 612 for SV(C|O) and mtDNA
accctatggagctttaatttattaatgcaaacagtacctaacaaacccacaggtcctaaactaccaaacctgcattaaaaatttcggttggggcgacctcggagcagaacccaacctccg

SEQ ID NO: 76504 - DNA, 120 bp, Homo sapiens; identical to SEQ ID NO: 60812
  misc_feature: 612 for SV(C|O) and mtDNA

SEQ ID NO: 76505 - DNA, 120 bp, Homo sapiens; identical to SEQ ID NO: 54182
  misc_feature: 612 for SV(C|O) and mtDNA

SEQ ID NO: 76506 - DNA, 120 bp, Homo sapiens; identical to SEQ ID NO: 60230
  misc_feature: 612 for SV(C|O) and mtDNA

SEQ ID NO: 76507 - DNA, 120 bp, Homo sapiens
  misc_feature: 612 for SV(C|O) and mtDNA
aaccataaccaatactaccaatcaatactcatcattaataatcataatggctatagcaataaaactaggaatagccccctttcacttctgggtcccagaggttacccaaggcacccctct

SEQ ID NO: 76508 - DNA, 120 bp, Homo sapiens; identical to SEQ ID NO: 61620
  misc_feature: 611 for SV(C|O) and mtDNA

SEQ ID NO: 76509 - DNA, 120 bp, Homo sapiens; identical to SEQ ID NO: 60937
  misc_feature: 611 for SV(C|O) and mtDNA

SEQ ID NO: 76510 - DNA, 120 bp, Homo sapiens
  misc_feature: 611 for SV(C|O) and mtDNA
tgacattaacactattctcaccagacctcctaggcgacccagacaattataccctagccaaccccttaaacacccctccccacatcaagcccgaatgatatttcctattcgcctacacaa

SEQ ID NO: 76511 - DNA, 120 bp, Homo sapiens
  misc_feature: 611 for SV(C|O) and mtDNA
ttgactattctctacaaaccacaaagacattggaacactatacctattattcggcgcatgagctggagtcctaggcacagctctaagcctccttattcgagccgagctgggccagccagg

SEQ ID NO: 76512 - DNA, 120 bp, Homo sapiens; identical to SEQ ID NO: 57828
  misc_feature: 611 for SV(C|O) and mtDNA

SEQ ID NO: 76513 - DNA, 120 bp, Homo sapiens
  misc_feature: 611 for SV(C|O) and mtDNA
ctagaaccaggcgacctgcgactccttgacgttgacaatcgagtagtactcccgattgaagcccccattcgtataataattacatcacaagacgtcttgcactcatgagctgtccccaca

SEQ ID NO: 76514 - DNA, 120 bp, Homo sapiens
  misc_feature: 611 for SV(C|O) and mtDNA
tggagatttggtgctgtgaaattgttttaggtaatagcttttctagtcaggttaggtctaggaggagtaggggcaggttttggctcgtaagaaggcctagataggggattgtgcggtgtg

SEQ ID NO: 76515 - DNA, 120 bp, Homo sapiens
  misc_feature: 611 for SV(C|O) and mtDNA
tgcagtgctctgagccctaggattcatctttcttttcaccgtaggcggcctgactggcattgtattagcaaactcatcactagacatcgtactacacgacacgtactacgttgtagctca

SEQ ID NO: 76516 - DNA, 120 bp, Homo sapiens
  misc_feature: 611 for SV(C|O) and mtDNA
tgacaaaacacatagcctaccccttccttgtactatccctatgaggcataattataacaagctccatctgcctacgacaaacagacctaaaatcgctcattgcatactcttcaatcagcc

SEQ ID NO: 76517 - DNA, 120 bp, Homo sapiens; identical to SEQ ID NO: 54996
  misc_feature: 611 for SV(C|O) and mtDNA

SEQ ID NO: 76518 - DNA, 120 bp, Homo sapiens
  misc_feature: 611 for SV(C|O) and mtDNA
tgaaacatcctatcatctgtaggctcattcatttctctaacagcagtaatattaataattttcatgatttgagaagccttcgcttcgaagcgaaaagtcctaatagtagaagaaccctcc

SEQ ID NO: 76519 - DNA, 120 bp, Homo sapiens
  misc_feature: 611 for SV(C|O) and mtDNA
tcgagtgatgtgggcgattgatgaaaaggcggttgaggcgtctggtgagtagtgcatggctaggaatagtcctgtggtgatttggaggatcaggcaggcgccaaggagtgagccgaagtt

SEQ ID NO: 76520 - DNA, 120 bp, Homo sapiens
  misc_feature: 611 for SV(C|O) and mtDNA
acaggtggtgtgtggtggccttggtatgtgctttctcgtgttacatcgcgccatcattggtatatggttagtgtgttggttagtaggcctagtatgaggagcgttatggagtggaagtga

SEQ ID NO: 76521 - DNA, 120 bp, Homo sapiens; identical to SEQ ID NO: 57570
  misc_feature: 611 for SV(C|O) and mtDNA

SEQ ID NO: 76522 - DNA, 120 bp, Homo sapiens; identical to SEQ ID NO: 52900
  misc_feature: 611 for SV(C|O) and mtDNA

SEQ ID NO: 76523 - DNA, 120 bp, Homo sapiens
  misc_feature: 611 for SV(C|O) and mtDNA
gtgctctgagccctaggattcatctttcttttcaccgtaggcggcctgactggcattgtattagcaaactcatcactagacatcgtactacacgacacgtactacgttgtagctcacttc

SEQ ID NO: 76524 - DNA, 120 bp, Homo sapiens
  misc_feature: 611 for SV(C|O) and mtDNA
ggtggtgtgtggtggccttggtatgtgctttctcgtgttacatcgcgccatcattggtatatggttagtgtgttggttagtaggcctagtatgaggagcgttatggagtggaagtgaaat

SEQ ID NO: 76525 - DNA, 120 bp, Homo sapiens
  misc_feature: 611 for SV(C|O) and mtDNA
ggtgatgatggaggtggagatttggtgctgtgaaattgttttaggtaatagcttttctagtcaggttaggtctaggaggagtaggggcaggttttggctcgtaagaaggcctagataggg

SEQ ID NO: 76526 - DNA, 120 bp, Homo sapiens
  misc_feature: 611 for SV(C|O) and mtDNA
ggacttttcgcttcgaagcgaaggcttctcaaatcatgaaaattattaatattactgctgttagagaaatgaatgagcctacagatgataggatgtttcatgtggtgtatgcatcggggt

SEQ ID NO: 76527 - DNA, 120 bp, Homo sapiens
  misc_feature: 611 for SV(C|O) and mtDNA
gcttcaatctacttctcccgccgccgggaaaaaaggcgggagaagccccggcaggtttgaagctgcttcttcgaatttgcaattcaatatgaaaatcacctcggagctggtaaaaagagg

SEQ ID NO: 76528 - DNA, 120 bp, Homo sapiens; identical to SEQ ID NO: 61513
  misc_feature: 611 for SV(C|O) and mtDNA

SEQ ID NO: 76529 - DNA, 120 bp, Homo sapiens; identical to SEQ ID NO: 55913
  misc_feature: 611 for SV(C|O) and mtDNA

SEQ ID NO: 76530 - DNA, 120 bp, Homo sapiens; identical to SEQ ID NO: 53571
  misc_feature: 611 for SV(C|O) and mtDNA

SEQ ID NO: 76531 - DNA, 120 bp, Homo sapiens
  misc_feature: 611 for SV(C|O) and mtDNA
ctcatcctagcaataatccccatcctccatatatccaaacaacaaagcataatatttcgcccactaagccaatcactttattgactcctagccgcagacctcctcattctaacctgaatc

SEQ ID NO: 76532 - DNA, 120 bp, Homo sapiens; identical to SEQ ID NO: 60039
  misc_feature: 611 for SV(C|O) and mtDNA

SEQ ID NO: 76533 - DNA, 120 bp, Homo sapiens; identical to SEQ ID NO: 57390
  misc_feature: 611 for SV(C|O) and mtDNA

SEQ ID NO: 76534 - DNA, 120 bp, Homo sapiens; identical to SEQ ID NO: 58724
  misc_feature: 611 for SV(C|O) and mtDNA

SEQ ID NO: 76535 - DNA, 120 bp, Homo sapiens
  misc_feature: 611 for SV(C|O) and mtDNA
aaccaggcgacctgcgactccttgacgttgacaatcgagtagtactcccgattgaagcccccattcgtataataattacatcacaagacgtcttgcactcatgagctgtccccacattag

SEQ ID NO: 76536 - DNA, 120 bp, Homo sapiens
  misc_feature: 611 for SV(C|O) and mtDNA
ctaacactatgcttaggcgctatcaccactctgttcgcagcagtctgcgcccttacacaaaatgacatcaaaaaaatcgtagccttctccacttcaagtcaactaggactcataatagtt

SEQ ID NO: 76537 - DNA, 120 bp, Homo sapiens
  misc_feature: 611 for SV(C|O) and mtDNA
cgagtgatgtgggcgattgatgaaaaggcggttgaggcgtctggtgagtagtgcatggctaggaatagtcctgtggtgatttggaggatcaggcaggcgccaaggagtgagccgaagttt

SEQ ID NO: 76538 - DNA, 120 bp, Homo sapiens; identical to SEQ ID NO: 61013
  misc_feature: 611 for SV(C|O) and mtDNA

SEQ ID NO: 76539 - DNA, 120 bp, Homo sapiens
  misc_feature: 611 for SV(C|O) and mtDNA
aggcgacccagacaattataccctagccaaccccttaaacacccctccccacatcaagcccgaatgatatttcctattcgcctacacaattctccgatccgtccctaacaaactaggagg

SEQ ID NO: 76540 - DNA, 120 bp, Homo sapiens; identical to SEQ ID NO: 56928
  misc_feature: 611 for SV(C|O) and mtDNA

SEQ ID NO: 76541 - DNA, 120 bp, Homo sapiens; identical to SEQ ID NO: 61646
  misc_feature: 611 for SV(C|O) and mtDNA

SEQ ID NO: 76542 - DNA, 120 bp, Homo sapiens
  misc_feature: 611 for SV(C|O) and mtDNA
ccagacaattataccctagccaaccccttaaacacccctccccacatcaagcccgaatgatatttcctattcgcctacacaattctccgatccgtccctaacaaactaggaggcgtcctt

SEQ ID NO: 76543 - DNA, 120 bp, Homo sapiens
  misc_feature: 611 for SV(C|O) and mtDNA
caatccccctctacctaaaactcacagccctcgctgtcactttcctaggacttctaacagccctagacctcaactacctaaccaacaaacttaaaataaaatccccactatgcacatttt

SEQ ID NO: 76544 - DNA, 120 bp, Homo sapiens
  misc_feature: 611 for SV(C|O) and mtDNA
atgatctgctgcagtgctctgagccctaggattcatctttcttttcaccgtaggcggcctgactggcattgtattagcaaactcatcactagacatcgtactacacgacacgtactacgt

SEQ ID NO: 76545 - DNA, 120 bp, Homo sapiens
  misc_feature: 611 for SV(C|O) and mtDNA
atagaaaccgtctgaactatcctgcccgccatcatcctagtcctcatcgccctcccatccctgcgcatcctttacataacagacgaggtcaacgatccctcccttaccatcaaatcaatt

SEQ ID NO: 76546 - DNA, 120 bp, Homo sapiens; identical to SEQ ID NO: 58761
  misc_feature: 611 for SV(C|O) and mtDNA

SEQ ID NO: 76547 - DNA, 120 bp, Homo sapiens; identical to SEQ ID NO: 60657
  misc_feature: 611 for SV(C|O) and mtDNA

SEQ ID NO: 76548 - DNA, 120 bp, Homo sapiens
  misc_feature: 611 for SV(C|O) and mtDNA
actaatcaaactaacctcaaaacaaatgataaccatacacaacactaaaggacgaacctgatctcttatactagtatccttaatcatttttattgccacaactaacctcctcggactcct

SEQ ID NO: 76549 - DNA, 120 bp, Homo sapiens
  misc_feature: 611 for SV(C|O) and mtDNA
aatcaactggcttcaatctacttctcccgccgccgggaaaaaaggcgggagaagccccggcaggtttgaagctgcttcttcgaatttgcaattcaatatgaaaatcacctcggagctggt

SEQ ID NO: 76550 - DNA, 120 bp, Homo sapiens
  misc_feature: 610 for SV(C|O) and mtDNA
cctaatcacataacctattcccccgagcaatctcaattacaatatatacaccaacaaacaatgttcaaccagtaactactactaatcaacgcccataatcatacaaagcccccgcaccaa

SEQ ID NO: 76551 - DNA, 120 bp, Homo sapiens; identical to SEQ ID NO: 61182
  misc_feature: 610 for SV(C|O) and mtDNA

SEQ ID NO: 76552 - DNA, 120 bp, Homo sapiens
  misc_feature: 610 for SV(C|O) and mtDNA
ctcgtagtaacagccattctcatccaaaccccctgaagcttcaccggcgcagtcattctcataatcgcccacggacttacatcctcattactattctgcctagcaaactcaaactacgaa

SEQ ID NO: 76553 - DNA, 120 bp, Homo sapiens; identical to SEQ ID NO: 56726
  misc_feature: 610 for SV(C|O) and mtDNA

SEQ ID NO: 76554 - DNA, 120 bp, Homo sapiens
  misc_feature: 610 for SV(C|O) and mtDNA
tgctcgtgtgtctacgtctattcctactgtaaatatatggtgtgctcacacgataaaccctaggaagccaattgatatcatagctcagaccatacctatgtatccaaatggttctttttt

SEQ ID NO: 76555 - DNA, 120 bp, Homo sapiens
  misc_feature: 610 for SV(C|O) and mtDNA
gaggttagcgaggcttgctagaagtcatcaaaaagctattagtgggagtagagtttgaagtccttgagagaggattatgatgcgactgtgagtgcgttcgtagtttgagtttgctaggca

SEQ ID NO: 76556 - DNA, 120 bp, Homo sapiens
  misc_feature: 610 for SV(C|O) and mtDNA
tgcaactccaaataaaagtaacaaccatgcacactactataaccaccctaaccctgacttccctaattccccccatccttaccaccctcgttaaccctaacaaaaaaaactcataccccc

SEQ ID NO: 76557 - DNA, 120 bp, Homo sapiens
  misc_feature: 610 for SV(C|O) and mtDNA
tgatttgatggtaagggagggatcgttgacctcgtctgttatgtaaaggatgcgcagggatgggagggcgatgaggactaggatgatggcgggcaggatagttcagacggtttctatttc

SEQ ID NO: 76558 - DNA, 120 bp, Homo sapiens
  misc_feature: 610 for SV(C|O) and mtDNA
tctactattaggacttttcgcttcgaagcgaaggcttctcaaatcatgaaaattattaatattactgctgttagagaaatgaatgagcctacagatgataggatgtttcatgtggtgtat

SEQ ID NO: 76559 - DNA, 120 bp, Homo sapiens
  misc_feature: 610 for SV(C|O) and mtDNA
atcctagcaataatccccatcctccatatatccaaacaacaaagcataatatttcgcccactaagccaatcactttattgactcctagccgcagacctcctcattctaacctgaatcgga

SEQ ID NO: 76560 - DNA, 120 bp, Homo sapiens; identical to SEQ ID NO: 56763
  misc_feature: 610 for SV(C|O) and mtDNA

SEQ ID NO: 76561 - DNA, 120 bp, Homo sapiens
  misc_feature: 610 for SV(C|O) and mtDNA
atgcctttttgggttgaggtgatgatggaggtggagatttggtgctgtgaaattgttttaggtaatagcttttctagtcaggttaggtctaggaggagtaggggcaggttttggctcgta

SEQ ID NO: 76562 - DNA, 120 bp, Homo sapiens
  misc_feature: 610 for SV(C|O) and mtDNA
tacaggactcaacatactagtcacagccctatactccctctacatatttaccacaacacaatggggctcactcacccaccacattaacaacataaaaccctcattcacacgagaaaacac

SEQ ID NO: 76563 - DNA, 120 bp, Homo sapiens; identical to SEQ ID NO: 58212
  misc_feature: 610 for SV(C|O) and mtDNA

SEQ ID NO: 76564 - DNA, 120 bp, Homo sapiens
  misc_feature: 610 for SV(C|O) and mtDNA
ataccaaacgcccctcttcgtctgatccgtcctaatcacagcagtcctacttctcctatctctcccagtcctagctgctggcatcactatactactaacagaccgcaacctcaacaccac

SEQ ID NO: 76565 - DNA, 120 bp, Homo sapiens
  misc_feature: 610 for SV(C|O) and mtDNA
gtagtacgtgtcgtgtagtacgatgtctagtgatgagtttgctaatacaatgccagtcaggccgcctacggtgaaaagaaagatgaatcctagggctcagagcactgcagcagatcattt

SEQ ID NO: 76566 - DNA, 120 bp, Homo sapiens
  misc_feature: 610 for SV(C|O) and mtDNA
gacctaacgtctttacgtgggtacttgcgcttactttgtagccttcatcagggtttgctgaagatggcggtatataggctgagcaagaggtggtgaggttgatcggggtttatcgattac

SEQ ID NO: 76567 - DNA, 120 bp, Homo sapiens; identical to SEQ ID NO: 60829
  misc_feature: 610 for SV(C|O) and mtDNA

SEQ ID NO: 76568 - DNA, 120 bp, Homo sapiens; identical to SEQ ID NO: 60297
  misc_feature: 610 for SV(C|O) and mtDNA

SEQ ID NO: 76569 - DNA, 120 bp, Homo sapiens
  misc_feature: 610 for SV(C|O) and mtDNA
aaaccgtctgaactatcctgcccgccatcatcctagtcctcatcgccctcccatccctgcgcatcctttacataacagacgaggtcaacgatccctcccttaccatcaaatcaattggcc

SEQ ID NO: 76570 - DNA, 120 bp, Homo sapiens
  misc_feature: 610 for SV(C|O) and mtDNA
ccctaatcaactggcttcaatctacttctcccgccgccgggaaaaaaggcgggagaagccccggcaggtttgaagctgcttcttcgaatttgcaattcaatatgaaaatcacctcggagc

SEQ ID NO: 76571 - DNA, 120 bp, Homo sapiens; identical to SEQ ID NO: 56061
  misc_feature: 610 for SV(C|O) and mtDNA

SEQ ID NO: 76572 - DNA, 120 bp, Homo sapiens; identical to SEQ ID NO: 57672
  misc_feature: 610 for SV(C|O) and mtDNA

SEQ ID NO: 76573 - DNA, 120 bp, Homo sapiens
  misc_feature: 610 for SV(C|O) and mtDNA
gcaatcctatacaaccgtatcggcgatatcggtttcatcctcgccttagcatgatttatcctacactccaactcatgagacccacaacaaatagcccttctaaacgctaatccaagcctc

SEQ ID NO: 76574 - DNA, 120 bp, Homo sapiens
  misc_feature: 610 for SV(C|O) and mtDNA
agacaattataccctagccaaccccttaaacacccctccccacatcaagcccgaatgatatttcctattcgcctacacaattctccgatccgtccctaacaaactaggaggcgtccttgc

SEQ ID NO: 76575 - DNA, 120 bp, Homo sapiens
  misc_feature: 610 for SV(C|O) and mtDNA
gataagtggcgttggcttgccatgattgtgaggggtaggagtcaggtagttagtattaggaggggggttgttagggggtcggaggaaaaggttggggaacagctaaataggttgttgttg

SEQ ID NO: 76576 - DNA, 120 bp, Homo sapiens
  misc_feature: 610 for SV(C|O) and mtDNA
ccggacaatgaaccataaccaatactaccaatcaatactcatcattaataatcataatggctatagcaataaaactaggaatagccccctttcacttctgggtcccagaggttacccaag

SEQ ID NO: 76577 - DNA, 120 bp, Homo sapiens
  misc_feature: 610 for SV(C|O) and mtDNA
cgtgtgtctacgtctattcctactgtaaatatatggtgtgctcacacgataaaccctaggaagccaattgatatcatagctcagaccatacctatgtatccaaatggttctttttttccg

SEQ ID NO: 76578 - DNA, 120 bp, Homo sapiens; identical to SEQ ID NO: 61980
  misc_feature: 610 for SV(C|O) and mtDNA

SEQ ID NO: 76579 - DNA, 120 bp, Homo sapiens; identical to SEQ ID NO: 60228
  misc_feature: 610 for SV(C|O) and mtDNA

SEQ ID NO: 76580 - DNA, 120 bp, Homo sapiens
  misc_feature: 610 for SV(C|O) and mtDNA
cacctttcatgatcacgccctcataatcattttccttatctgcttcctagtcctgtatgcccttttcctaacactcacaacaaaactaactaatactaacatctcagacgctcaggaaat

SEQ ID NO: 76581 - DNA, 120 bp, Homo sapiens
  misc_feature: 610 for SV(C|O) and mtDNA
atctgctgcagtgctctgagccctaggattcatctttcttttcaccgtaggcggcctgactggcattgtattagcaaactcatcactagacatcgtactacacgacacgtactacgttgt

SEQ ID NO: 76582 - DNA, 120 bp, Homo sapiens
  misc_feature: 610 for SV(C|O) and mtDNA
actggataagtggcgttggcttgccatgattgtgaggggtaggagtcaggtagttagtattaggaggggggttgttagggggtcggaggaaaaggttggggaacagctaaataggttgtt

SEQ ID NO: 76583 - DNA, 120 bp, Homo sapiens; identical to SEQ ID NO: 57627
  misc_feature: 610 for SV(C|O) and mtDNA

SEQ ID NO: 76584 - DNA, 120 bp, Homo sapiens; identical to SEQ ID NO: 59251
  misc_feature: 610 for SV(C|O) and mtDNA

SEQ ID NO: 76585 - DNA, 120 bp, Homo sapiens; identical to SEQ ID NO: 61971
  misc_feature: 609 for SV(C|O) and mtDNA

SEQ ID NO: 76586 - DNA, 120 bp, Homo sapiens
  misc_feature: 609 for SV(C|O) and mtDNA
cttccctaattccccccatccttaccaccctcgttaaccctaacaaaaaaaactcatacccccattatgtaaaatccattgtcgcatccacctttattatcagtctcttccccacaacaa

SEQ ID NO: 76587 - DNA, 120 bp, Homo sapiens; identical to SEQ ID NO: 57596
  misc_feature: 609 for SV(C|O) and mtDNA

SEQ ID NO: 76588 - DNA, 120 bp, Homo sapiens
  misc_feature: 609 for SV(C|O) and mtDNA
gtgtgctcacacgataaaccctaggaagccaattgatatcatagctcagaccatacctatgtatccaaatggttctttttttccggagtagtaagttacaatatgggagattattccgaa

SEQ ID NO: 76589 - DNA, 120 bp, Homo sapiens; identical to SEQ ID NO: 59653
  misc_feature: 609 for SV(C|O) and mtDNA

SEQ ID NO: 76590 - DNA, 120 bp, Homo sapiens
  misc_feature: 609 for SV(C|O) and mtDNA
ctttgattgtgtagtaagggtggaaggtgattttatcggaatgggaggtgattcctagggggttgtttgatcccgtttcgtgcaagaataggaggtggagtgctgctagggctgcaataa

SEQ ID NO: 76591 - DNA, 120 bp, Homo sapiens
  misc_feature: 609 for SV(C|O) and mtDNA
atgacattaacactattctcaccagacctcctaggcgacccagacaattataccctagccaaccccttaaacacccctccccacatcaagcccgaatgatatttcctattcgcctacaca

SEQ ID NO: 76592 - DNA, 120 bp, Homo sapiens
  misc_feature: 609 for SV(C|O) and mtDNA
tggctttctcaacttttaaaggataacagctatccattggtcttaggccccaaaaattttggtgcaactccaaataaaagtaacaaccatgcacactactataaccaccctaaccctgac

SEQ ID NO: 76593 - DNA, 120 bp, Homo sapiens
  misc_feature: 609 for SV(C|O) and mtDNA
tgctcacacgataaaccctaggaagccaattgatatcatagctcagaccatacctatgtatccaaatggttctttttttccggagtagtaagttacaatatgggagattattccgaagcc

SEQ ID NO: 76594 - DNA, 120 bp, Homo sapiens
  misc_feature: 609 for SV(C|O) and mtDNA
ccataatcatacaaagcccccgcaccaataggatcctcccgaatcaaccctgacccctctccttcataaattattcagcttcctacactattaaagtttaccacaaccaccaccccatca

SEQ ID NO: 76595 - DNA, 120 bp, Homo sapiens; identical to SEQ ID NO: 56732
  misc_feature: 609 for SV(C|O) and mtDNA

SEQ ID NO: 76596 - DNA, 120 bp, Homo sapiens
  misc_feature: 609 for SV(C|O) and mtDNA
ctaacgtctttacgtgggtacttgcgcttactttgtagccttcatcagggtttgctgaagatggcggtatataggctgagcaagaggtggtgaggttgatcggggtttatcgattacaga

SEQ ID NO: 76597 - DNA, 120 bp, Homo sapiens
  misc_feature: 609 for SV(C|O) and mtDNA
tctacttctcccgccgccgggaaaaaaggcgggagaagccccggcaggtttgaagctgcttcttcgaatttgcaattcaatatgaaaatcacctcggagctggtaaaaagaggcctaacc

SEQ ID NO: 76598 - DNA, 120 bp, Homo sapiens; identical to SEQ ID NO: 57484
  misc_feature: 609 for SV(C|O) and mtDNA

SEQ ID NO: 76599 - DNA, 120 bp, Homo sapiens; identical to SEQ ID NO: 60596
  misc_feature: 609 for SV(C|O) and mtDNA

SEQ ID NO: 76600 - DNA, 120 bp, Homo sapiens
  misc_feature: 609 for SV(C|O) and mtDNA
tatgagattgtttgggctactgctcgcagtgcgccgatcagggcgtagtttgagtttgatgctcaccctgatcagaggattgagtaaacggctaggctagaggtggctagaataaatagg

SEQ ID NO: 76601 - DNA, 120 bp, Homo sapiens
  misc_feature: 609 for SV(C|O) and mtDNA
atcccatacattgggacagacctagttcaatgaatctgaggaggctactcagtagacagtcccaccctcacacgattctttacctttcacttcatcttgcccttcattattgcagcccta

SEQ ID NO: 76602 - DNA, 120 bp, Homo sapiens; identical to SEQ ID NO: 62522
  misc_feature: 609 for SV(C|O) and mtDNA

SEQ ID NO: 76603 - DNA, 120 bp, Homo sapiens
  misc_feature: 609 for SV(C|O) and mtDNA
cacccccactgatgttcgccgaccgttgactattctctacaaaccacaaagacattggaacactatacctattattcggcgcatgagctggagtcctaggcacagctctaagcctcctta

SEQ ID NO: 76604 - DNA, 120 bp, Homo sapiens
  misc_feature: 609 for SV(C|O) and mtDNA
acaggactcaacatactagtcacagccctatactccctctacatatttaccacaacacaatggggctcactcacccaccacattaacaacataaaaccctcattcacacgagaaaacacc

SEQ ID NO: 76605 - DNA, 120 bp, Homo sapiens; identical to SEQ ID NO: 60673
  misc_feature: 609 for SV(C|O) and mtDNA

SEQ ID NO: 76606 - DNA, 120 bp, Homo sapiens; identical to SEQ ID NO: 58063
  misc_feature: 609 for SV(C|O) and mtDNA

SEQ ID NO: 76607 - DNA, 120 bp, Homo sapiens; identical to SEQ ID NO: 61369
  misc_feature: 609 for SV(C|O) and mtDNA

SEQ ID NO: 76608 - DNA, 120 bp, Homo sapiens; identical to SEQ ID NO: 61029
  misc_feature: 609 for SV(C|O) and mtDNA

SEQ ID NO: 76609 - DNA, 120 bp, Homo sapiens; identical to SEQ ID NO: 53636
  misc_feature: 609 for SV(C|O) and mtDNA

SEQ ID NO: 76610 - DNA, 120 bp, Homo sapiens
  misc_feature: 609 for SV(C|O) and mtDNA
atcggaggacaaccagtaagctacccttttaccatcattggacaagtagcatccgtactatacttcacaacaatcctaatcctaataccaactatctccctaattgaaaacaaaatactc

SEQ ID NO: 76611 - DNA, 120 bp, Homo sapiens
  misc_feature: 609 for SV(C|O) and mtDNA
atagcctaccccttccttgtactatccctatgaggcataattataacaagctccatctgcctacgacaaacagacctaaaatcgctcattgcatactcttcaatcagccacatagccctc

SEQ ID NO: 76612 - DNA, 120 bp, Homo sapiens
  misc_feature: 609 for SV(C|O) and mtDNA
cagtatcaggcggcggcttcgaagccaaagtgatgtttggatgtaaagtgaaatattagttggcggatgaagcagatagtgaggaaagttgagccaataatgacgtgaagtccgtggaag

SEQ ID NO: 76613 - DNA, 120 bp, Homo sapiens
  misc_feature: 609 for SV(C|O) and mtDNA
ctcacacgataaaccctaggaagccaattgatatcatagctcagaccatacctatgtatccaaatggttctttttttccggagtagtaagttacaatatgggagattattccgaagcctg

SEQ ID NO: 76614 - DNA, 120 bp, Homo sapiens
  misc_feature: 609 for SV(C|O) and mtDNA
aatgatctgctgcagtgctctgagccctaggattcatctttcttttcaccgtaggcggcctgactggcattgtattagcaaactcatcactagacatcgtactacacgacacgtactacg

SEQ ID NO: 76615 - DNA, 120 bp, Homo sapiens
  misc_feature: 609 for SV(C|O) and mtDNA
cggcctgactggcattgtattagcaaactcatcactagacatcgtactacacgacacgtactacgttgtagctcacttccactatgtcctatcaataggagctgtatttgccatcatagg

SEQ ID NO: 76616 - DNA, 120 bp, Homo sapiens; identical to SEQ ID NO: 57753
  misc_feature: 609 for SV(C|O) and mtDNA

SEQ ID NO: 76617 - DNA, 120 bp, Homo sapiens
  misc_feature: 609 for SV(C|O) and mtDNA
cccccactgatgttcgccgaccgttgactattctctacaaaccacaaagacattggaacactatacctattattcggcgcatgagctggagtcctaggcacagctctaagcctccttatt

SEQ ID NO: 76618 - DNA, 120 bp, Homo sapiens
  misc_feature: 609 for SV(C|O) and mtDNA
atcaggcggcggcttcgaagccaaagtgatgtttggatgtaaagtgaaatattagttggcggatgaagcagatagtgaggaaagttgagccaataatgacgtgaagtccgtggaagcctg

SEQ ID NO: 76619 - DNA, 120 bp, Homo sapiens
  misc_feature: 609 for SV(C|O) and mtDNA
acatggctttctcaacttttaaaggataacagctatccattggtcttaggccccaaaaattttggtgcaactccaaataaaagtaacaaccatgcacactactataaccaccctaaccct

SEQ ID NO: 76620 - DNA, 120 bp, Homo sapiens; identical to SEQ ID NO: 59156
  misc_feature: 609 for SV(C|O) and mtDNA

SEQ ID NO: 76621 - DNA, 120 bp, Homo sapiens; identical to SEQ ID NO: 61253
  misc_feature: 608 for SV(C|O) and mtDNA

SEQ ID NO: 76622 - DNA, 120 bp, Homo sapiens; identical to SEQ ID NO: 57797
  misc_feature: 608 for SV(C|O) and mtDNA

SEQ ID NO: 76623 - DNA, 120 bp, Homo sapiens
  misc_feature: 608 for SV(C|O) and mtDNA
ttccctaattccccccatccttaccaccctcgttaaccctaacaaaaaaaactcatacccccattatgtaaaatccattgtcgcatccacctttattatcagtctcttccccacaacaat

SEQ ID NO: 76624 - DNA, 120 bp, Homo sapiens
  misc_feature: 608 for SV(C|O) and mtDNA
ttagtgggctattttctgctagggggtggaagcggatgagtaagaagattcctgctacaactatagtgcttgagtggagtagggctgagactggggtggggccttctatggctgagggga

SEQ ID NO: 76625 - DNA, 120 bp, Homo sapiens
  misc_feature: 608 for SV(C|O) and mtDNA
ataaccaatactaccaatcaatactcatcattaataatcataatggctatagcaataaaactaggaatagccccctttcacttctgggtcccagaggttacccaaggcacccctctgaca

SEQ ID NO: 76626 - DNA, 120 bp, Homo sapiens
  misc_feature: 608 for SV(C|O) and mtDNA
tcatccatggggacgagaagggatttgactgtaatgtgctatgtacggtaaatggctttatgtactatgtgctgttaagggtgagtaggtttgttggtatcctagtgggtgaggggtggc

SEQ ID NO: 76627 - DNA, 120 bp, Homo sapiens
  misc_feature: 608 for SV(C|O) and mtDNA
atggctttctcaacttttaaaggataacagctatccattggtcttaggccccaaaaattttggtgcaactccaaataaaagtaacaaccatgcacactactataaccaccctaaccctga

SEQ ID NO: 76628 - DNA, 120 bp, Homo sapiens; identical to SEQ ID NO: 60850
  misc_feature: 608 for SV(C|O) and mtDNA

SEQ ID NO: 76629 - DNA, 120 bp, Homo sapiens; identical to SEQ ID NO: 57566
  misc_feature: 608 for SV(C|O) and mtDNA

SEQ ID NO: 76630 - DNA, 120 bp, Homo sapiens
  misc_feature: 608 for SV(C|O) and mtDNA
tatgcctttttgggttgaggtgatgatggaggtggagatttggtgctgtgaaattgttttaggtaatagcttttctagtcaggttaggtctaggaggagtaggggcaggttttggctcgt

SEQ ID NO: 76631 - DNA, 120 bp, Homo sapiens; identical to SEQ ID NO: 53069
  misc_feature: 608 for SV(C|O) and mtDNA

SEQ ID NO: 76632 - DNA, 120 bp, Homo sapiens
  misc_feature: 608 for SV(C|O) and mtDNA
accgctatgtaattcgtacattactgccagccaccatgaatattgtacggtaccataaatacttgaccacctgtagtacataaaaacccaatccacatcaaaaccccctccccatgctta

SEQ ID NO: 76633 - DNA, 120 bp, Homo sapiens
  misc_feature: 608 for SV(C|O) and mtDNA
gttcgccgaccgttgactattctctacaaaccacaaagacattggaacactatacctattattcggcgcatgagctggagtcctaggcacagctctaagcctccttattcgagccgagct

SEQ ID NO: 76634 - DNA, 120 bp, Homo sapiens; identical to SEQ ID NO: 62394
  misc_feature: 608 for SV(C|O) and mtDNA

SEQ ID NO: 76635 - DNA, 120 bp, Homo sapiens
  misc_feature: 608 for SV(C|O) and mtDNA
gtaccgcaagggaaagatgaaaaattataaccaagcataatacagcaaggactaacccctataccttctgcataatgaattaactagaaataactttgcaaggagagccaaagctaagac

SEQ ID NO: 76636 - DNA, 120 bp, Homo sapiens; identical to SEQ ID NO: 61495
  misc_feature: 608 for SV(C|O) and mtDNA

SEQ ID NO: 76637 - DNA, 120 bp, Homo sapiens; identical to SEQ ID NO: 58178
  misc_feature: 608 for SV(C|O) and mtDNA

SEQ ID NO: 76638 - DNA, 120 bp, Homo sapiens
  misc_feature: 608 for SV(C|O) and mtDNA
gcattcctaatgcttaccgaacgaaaaattctaggctatatacaactacgcaaaggccccaacgttgtaggcccctacgggctactacaacccttcgctgacgccataaaactcttcacc

SEQ ID NO: 76639 - DNA, 120 bp, Homo sapiens
  misc_feature: 608 for SV(C|O) and mtDNA
cagtacacttaccatgttacgacttgtctcctctatataaatgcgtaggggttttagttaaatgtcctttgaagtatacttgaggagggtgacgggcggtgtgtacgcgcttcagggccc

SEQ ID NO: 76640 - DNA, 120 bp, Homo sapiens
  misc_feature: 608 for SV(C|O) and mtDNA
atggtgtgctcacacgataaaccctaggaagccaattgatatcatagctcagaccatacctatgtatccaaatggttctttttttccggagtagtaagttacaatatgggagattattcc

SEQ ID NO: 76641 - DNA, 120 bp, Homo sapiens
  misc_feature: 608 for SV(C|O) and mtDNA
gatttgatggtaagggagggatcgttgacctcgtctgttatgtaaaggatgcgcagggatgggagggcgatgaggactaggatgatggcgggcaggatagttcagacggtttctatttcc

SEQ ID NO: 76642 - DNA, 120 bp, Homo sapiens
  misc_feature: 608 for SV(C|O) and mtDNA
gcgtgcacaccccccagacgaaaataccaaatgcatggagagctcccgtgagtggttaatagggtgatagacctgtgatccatcgtgatgtcttatttaaggggaacgtgtgggctattt

SEQ ID NO: 76643 - DNA, 120 bp, Homo sapiens; identical to SEQ ID NO: 56585
  misc_feature: 608 for SV(C|O) and mtDNA

SEQ ID NO: 76644 - DNA, 120 bp, Homo sapiens
  misc_feature: 608 for SV(C|O) and mtDNA
ctcgtgtgtctacgtctattcctactgtaaatatatggtgtgctcacacgataaaccctaggaagccaattgatatcatagctcagaccatacctatgtatccaaatggttctttttttc

SEQ ID NO: 76645 - DNA, 120 bp, Homo sapiens; identical to SEQ ID NO: 56027
  misc_feature: 608 for SV(C|O) and mtDNA

SEQ ID NO: 76646 - DNA, 120 bp, Homo sapiens; identical to SEQ ID NO: 58273
  misc_feature: 608 for SV(C|O) and mtDNA

SEQ ID NO: 76647 - DNA, 120 bp, Homo sapiens
  misc_feature: 608 for SV(C|O) and mtDNA
ctggataagtggcgttggcttgccatgattgtgaggggtaggagtcaggtagttagtattaggaggggggttgttagggggtcggaggaaaaggttggggaacagctaaataggttgttg

SEQ ID NO: 76648 - DNA, 120 bp, Homo sapiens
  misc_feature: 608 for SV(C|O) and mtDNA
aggttagcgaggcttgctagaagtcatcaaaaagctattagtgggagtagagtttgaagtccttgagagaggattatgatgcgactgtgagtgcgttcgtagtttgagtttgctaggcag

SEQ ID NO: 76649 - DNA, 120 bp, Homo sapiens
  misc_feature: 608 for SV(C|O) and mtDNA
ccagtaggttaatagtggggggtaaggcgaggttagcgaggcttgctagaagtcatcaaaaagctattagtgggagtagagtttgaagtccttgagagaggattatgatgcgactgtgag

SEQ ID NO: 76650 - DNA, 120 bp, Homo sapiens
  misc_feature: 608 for SV(C|O) and mtDNA
cgggataatcctatttattacctcagaagtttttttcttcgcaggatttttctgagccttttaccactccagcctagcccctaccccccaattaggagggcactggcccccaacaggcat

SEQ ID NO: 76651 - DNA, 120 bp, Homo sapiens
  misc_feature: 608 for SV(C|O) and mtDNA
cctagcaataatccccatcctccatatatccaaacaacaaagcataatatttcgcccactaagccaatcactttattgactcctagccgcagacctcctcattctaacctgaatcggagg

SEQ ID NO: 76652 - DNA, 120 bp, Homo sapiens; identical to SEQ ID NO: 61335
  misc_feature: 608 for SV(C|O) and mtDNA

SEQ ID NO: 76653 - DNA, 120 bp, Homo sapiens; identical to SEQ ID NO: 60280
  misc_feature: 608 for SV(C|O) and mtDNA

SEQ ID NO: 76654 - DNA, 120 bp, Homo sapiens
  misc_feature: 608 for SV(C|O) and mtDNA
agaaaccgtctgaactatcctgcccgccatcatcctagtcctcatcgccctcccatccctgcgcatcctttacataacagacgaggtcaacgatccctcccttaccatcaaatcaattgg

SEQ ID NO: 76655 - DNA, 120 bp, Homo sapiens; identical to SEQ ID NO: 60745
  misc_feature: 608 for SV(C|O) and mtDNA

SEQ ID NO: 76656 - DNA, 120 bp, Homo sapiens
  misc_feature: 608 for SV(C|O) and mtDNA
acctgcacgacaacacataatgacccaccaatcacatgcctatcatatagtaaaacccagcccatgacccctaacaggggccctctcagccctcctaatgacctccggcctagccatgtg

SEQ ID NO: 76657 - DNA, 120 bp, Homo sapiens
  misc_feature: 608 for SV(C|O) and mtDNA
caattataccctagccaaccccttaaacacccctccccacatcaagcccgaatgatatttcctattcgcctacacaattctccgatccgtccctaacaaactaggaggcgtccttgccct

SEQ ID NO: 76658 - DNA, 120 bp, Homo sapiens; identical to SEQ ID NO: 58433
  misc_feature: 608 for SV(C|O) and mtDNA

SEQ ID NO: 76659 - DNA, 120 bp, Homo sapiens
  misc_feature: 608 for SV(C|O) and mtDNA
agtttgggtcttagctattgtgtgttcagatatgttaaagccactttcgtagtctattttgtgtcagctggagttttttacaactcaggtgagttttagctttattggggagggggtgat

SEQ ID NO: 76660 - DNA, 120 bp, Homo sapiens
  misc_feature: 608 for SV(C|O) and mtDNA
atagctatcctcttcaacaatatactctccggacaatgaaccataaccaatactaccaatcaatactcatcattaataatcataatggctatagcaataaaactaggaatagcccccttt

SEQ ID NO: 76661 - DNA, 120 bp, Homo sapiens; identical to SEQ ID NO: 61231
  misc_feature: 608 for SV(C|O) and mtDNA

SEQ ID NO: 76662 - DNA, 120 bp, Homo sapiens
  misc_feature: 608 for SV(C|O) and mtDNA
agtatgggggtaattatggtgggccatacggtagtatttagttggggcatttcactgtaaagaggtgttggttctcttaatctttaacttaaaaggttaatgctaagttagctttacagt

SEQ ID NO: 76663 - DNA, 120 bp, Homo sapiens; identical to SEQ ID NO: 58579
  misc_feature: 607 for SV(C|O) and mtDNA

SEQ ID NO: 76664 - DNA, 120 bp, Homo sapiens
  misc_feature: 607 for SV(C|O) and mtDNA
ttctctccttaatgacattaacactattctcaccagacctcctaggcgacccagacaattataccctagccaaccccttaaacacccctccccacatcaagcccgaatgatatttcctat

SEQ ID NO: 76665 - DNA, 120 bp, Homo sapiens
  misc_feature: 607 for SV(C|O) and mtDNA
tcctcatcctagcaataatccccatcctccatatatccaaacaacaaagcataatatttcgcccactaagccaatcactttattgactcctagccgcagacctcctcattctaacctgaa

SEQ ID NO: 76666 - DNA, 120 bp, Homo sapiens
  misc_feature: 607 for SV(C|O) and mtDNA
acttccctaattccccccatccttaccaccctcgttaaccctaacaaaaaaaactcatacccccattatgtaaaatccattgtcgcatccacctttattatcagtctcttccccacaaca

SEQ ID NO: 76667 - DNA, 120 bp, Homo sapiens; identical to SEQ ID NO: 58411
  misc_feature: 607 for SV(C|O) and mtDNA

SEQ ID NO: 76668 - DNA, 120 bp, Homo sapiens
  misc_feature: 607 for SV(C|O) and mtDNA
agtagtgtgcatggttgttacttttatttggagttgcaccaaaatttttggggcctaagaccaatggatagctgttatcctttaaaagttgagaaagccatgttgttagacatgggggca

SEQ ID NO: 76669 - DNA, 120 bp, Homo sapiens
  misc_feature: 607 for SV(C|O) and mtDNA
gaaaatagcccactaatccaaactctaacactatgcttaggcgctatcaccactctgttcgcagcagtctgcgcccttacacaaaatgacatcaaaaaaatcgtagccttctccacttca

SEQ ID NO: 76670 - DNA, 120 bp, Homo sapiens; identical to SEQ ID NO: 58588
  misc_feature: 607 for SV(C|O) and mtDNA

SEQ ID NO: 76671 - DNA, 120 bp, Homo sapiens
  misc_feature: 607 for SV(C|O) and mtDNA
tccctgagaatccaaaattctccgtgccacctatcacaccccatcctaaagtaaggtcagctaaataagctatcgggcccataccccgaaaatgttggttatacccttcccgtactaatt

SEQ ID NO: 76672 - DNA, 120 bp, Homo sapiens
  misc_feature: 607 for SV(C|O) and mtDNA
tcaatactcatcattaataatcataatggctatagcaataaaactaggaatagccccctttcacttctgggtcccagaggttacccaaggcacccctctgacatccggcctgcttcttct

SEQ ID NO: 76673 - DNA, 120 bp, Homo sapiens; identical to SEQ ID NO: 58626
  misc_feature: 607 for SV(C|O) and mtDNA

SEQ ID NO: 76674 - DNA, 120 bp, Homo sapiens
  misc_feature: 607 for SV(C|O) and mtDNA
caatggattttacataatgggggtatgagttttttttgttagggttaacgagggtggtaaggatggggggaattagggaagtcagggttagggtggttatagtagtgtgcatggttgtta

SEQ ID NO: 76675 - DNA, 120 bp, Homo sapiens
  misc_feature: 607 for SV(C|O) and mtDNA
cacaaaatagactacgaaagtggctttaacatatctgaacacacaatagctaagacccaaactgggattagataccccactatgcttagccctaaacctcaacagttaaatcaacaaaac

SEQ ID NO: 76676 - DNA, 120 bp, Homo sapiens
  misc_feature: 607 for SV(C|O) and mtDNA
gtttgggctactgctcgcagtgcgccgatcagggcgtagtttgagtttgatgctcaccctgatcagaggattgagtaaacggctaggctagaggtggctagaataaataggaggcctagg

SEQ ID NO: 76677 - DNA, 120 bp, Homo sapiens
  misc_feature: 607 for SV(C|O) and mtDNA
gtcatccatggggacgagaagggatttgactgtaatgtgctatgtacggtaaatggctttatgtactatgtgctgttaagggtgagtaggtttgttggtatcctagtgggtgaggggtgg

SEQ ID NO: 76678 - DNA, 120 bp, Homo sapiens
  misc_feature: 607 for SV(C|O) and mtDNA
gtacacttaccatgttacgacttgtctcctctatataaatgcgtaggggttttagttaaatgtcctttgaagtatacttgaggagggtgacgggcggtgtgtacgcgcttcagggccctg

SEQ ID NO: 76679 - DNA, 120 bp, Homo sapiens
  misc_feature: 607 for SV(C|O) and mtDNA
aggagtatgggggtaattatggtgggccatacggtagtatttagttggggcatttcactgtaaagaggtgttggttctcttaatctttaacttaaaaggttaatgctaagttagctttac

SEQ ID NO: 76680 - DNA, 120 bp, Homo sapiens
  misc_feature: 607 for SV(C|O) and mtDNA
ggtcatccatggggacgagaagggatttgactgtaatgtgctatgtacggtaaatggctttatgtactatgtgctgttaagggtgagtaggtttgttggtatcctagtgggtgaggggtg

SEQ ID NO: 76681 - DNA, 120 bp, Homo sapiens
  misc_feature: 607 for SV(C|O) and mtDNA
ggtaaaaaatcagtgcgagcttagcgctgtgatgagtgtgcctgcaaagatggtagagtagatgacgggttgggccaggggattaattagtacgggaagggtataaccaacattttcggg

SEQ ID NO: 76682 - DNA, 120 bp, Homo sapiens
  misc_feature: 607 for SV(C|O) and mtDNA
caggactcaacatactagtcacagccctatactccctctacatatttaccacaacacaatggggctcactcacccaccacattaacaacataaaaccctcattcacacgagaaaacaccc

SEQ ID NO: 76683 - DNA, 120 bp, Homo sapiens
  misc_feature: 607 for SV(C|O) and mtDNA
gcaatgaatgaagcgaacagattttcgttcattttggttctcagggtttgttataattttttatttttatgggctttggtgagggaggtaggtggtagtttgtgtttaatatttttagtt

SEQ ID NO: 76684 - DNA, 120 bp, Homo sapiens; identical to SEQ ID NO: 59504
  misc_feature: 607 for SV(C|O) and mtDNA

SEQ ID NO: 76685 - DNA, 120 bp, Homo sapiens
  misc_feature: 607 for SV(C|O) and mtDNA
ctgctgcagtgctctgagccctaggattcatctttcttttcaccgtaggcggcctgactggcattgtattagcaaactcatcactagacatcgtactacacgacacgtactacgttgtag

SEQ ID NO: 76686 - DNA, 120 bp, Homo sapiens
  misc_feature: 607 for SV(C|O) and mtDNA
ctaatcacataacctattcccccgagcaatctcaattacaatatatacaccaacaaacaatgttcaaccagtaactactactaatcaacgcccataatcatacaaagcccccgcaccaat

SEQ ID NO: 76687 - DNA, 120 bp, Homo sapiens
  misc_feature: 607 for SV(C|O) and mtDNA
cctactcctaatcacataacctattcccccgagcaatctcaattacaatatatacaccaacaaacaatgttcaaccagtaactactactaatcaacgcccataatcatacaaagcccccg

SEQ ID NO: 76688 - DNA, 120 bp, Homo sapiens; identical to SEQ ID NO: 59971
  misc_feature: 607 for SV(C|O) and mtDNA

SEQ ID NO: 76689 - DNA, 120 bp, Homo sapiens
  misc_feature: 607 for SV(C|O) and mtDNA
cagacaattataccctagccaaccccttaaacacccctccccacatcaagcccgaatgatatttcctattcgcctacacaattctccgatccgtccctaacaaactaggaggcgtccttg

SEQ ID NO: 76690 - DNA, 120 bp, Homo sapiens
  misc_feature: 607 for SV(C|O) and mtDNA
agtcatgttagcttgtttcaggtgcgagatagtagtagggtcgtggtgctggagtttaagttgagtagtaggaatgcggtagtagttaggataatataaatagttaaattaagaatggtt

SEQ ID NO: 76691 - DNA, 120 bp, Homo sapiens
  misc_feature: 607 for SV(C|O) and mtDNA
acaatggattttacataatgggggtatgagttttttttgttagggttaacgagggtggtaaggatggggggaattagggaagtcagggttagggtggttatagtagtgtgcatggttgtt

SEQ ID NO: 76692 - DNA, 120 bp, Homo sapiens
  misc_feature: 606 for SV(C|O) and mtDNA
ccccatggatgacccccctcagataggggtcccttgaccaccatcctccgtgaaatcaatatcccgcacaagagtgctactctcctcgctccgggcccataacacttgggggtagctaaa

SEQ ID NO: 76693 - DNA, 120 bp, Homo sapiens
  misc_feature: 606 for SV(C|O) and mtDNA
gggctattcctagttttattgctatagccattatgattattaatgatgagtattgattggtagtattggttatggttcattgtccggagagtatattgttgaagaggatagctattagaa

SEQ ID NO: 76694 - DNA, 120 bp, Homo sapiens; identical to SEQ ID NO: 58281
  misc_feature: 606 for SV(C|O) and mtDNA

SEQ ID NO: 76695 - DNA, 120 bp, Homo sapiens
  misc_feature: 606 for SV(C|O) and mtDNA
ttagggggtcggaggaaaaggttggggaacagctaaataggttgttgttgatttggttaaaaaatagtagagggatgatgctaataattaggctgtgggtggttgtgttgattcaaatta

SEQ ID NO: 76696 - DNA, 120 bp, Homo sapiens
  misc_feature: 606 for SV(C|O) and mtDNA
tgtgctcacacgataaaccctaggaagccaattgatatcatagctcagaccatacctatgtatccaaatggttctttttttccggagtagtaagttacaatatgggagattattccgaag

SEQ ID NO: 76697 - DNA, 120 bp, Homo sapiens
  misc_feature: 606 for SV(C|O) and mtDNA
acctaacgtctttacgtgggtacttgcgcttactttgtagccttcatcagggtttgctgaagatggcggtatataggctgagcaagaggtggtgaggttgatcggggtttatcgattaca

SEQ ID NO: 76698 - DNA, 120 bp, Homo sapiens
  misc_feature: 606 for SV(C|O) and mtDNA
ggagtatgggggtaattatggtgggccatacggtagtatttagttggggcatttcactgtaaagaggtgttggttctcttaatctttaacttaaaaggttaatgctaagttagctttaca

SEQ ID NO: 76699 - DNA, 120 bp, Homo sapiens
  misc_feature: 606 for SV(C|O) and mtDNA
tgggtttttatgtactacaggtggtcaagtatttatggtaccgtacaatattcatggtggctggcagtaatgtacgaattacatagcggttgttgatgggtgagtcaatacttgggtggc

SEQ ID NO: 76700 - DNA, 120 bp, Homo sapiens; identical to SEQ ID NO: 57228
  misc_feature: 606 for SV(C|O) and mtDNA

SEQ ID NO: 76701 - DNA, 120 bp, Homo sapiens; identical to SEQ ID NO: 61343
  misc_feature: 606 for SV(C|O) and mtDNA

SEQ ID NO: 76702 - DNA, 120 bp, Homo sapiens
  misc_feature: 606 for SV(C|O) and mtDNA
tcgtgtgtctacgtctattcctactgtaaatatatggtgtgctcacacgataaaccctaggaagccaattgatatcatagctcagaccatacctatgtatccaaatggttctttttttcc

SEQ ID NO: 76703 - DNA, 120 bp, Homo sapiens
  misc_feature: 606 for SV(C|O) and mtDNA
ggtgtgctcacacgataaaccctaggaagccaattgatatcatagctcagaccatacctatgtatccaaatggttctttttttccggagtagtaagttacaatatgggagattattccga

SEQ ID NO: 76704 - DNA, 120 bp, Homo sapiens
  misc_feature: 606 for SV(C|O) and mtDNA
tcccccgcccgcgtccctttctccataaaattcttcttagtagctattaccttcttattatttgatctagaaattgccctccttttacccctaccatgagccctacaaacaactaaccta

SEQ ID NO: 76705 - DNA, 120 bp, Homo sapiens
  misc_feature: 606 for SV(C|O) and mtDNA
tcaggcaggcgccaaggagtgagccgaagtttcatcatgcggagatgttggatggggtggggaggtcgatgaatgagtggttaattaattttattagggggttaattttgcgtattgggg

SEQ ID NO: 76706 - DNA, 120 bp, Homo sapiens
  misc_feature: 606 for SV(C|O) and mtDNA
tatcccccgcccgcgtccctttctccataaaattcttcttagtagctattaccttcttattatttgatctagaaattgccctccttttacccctaccatgagccctacaaacaactaacc

SEQ ID NO: 76707 - DNA, 120 bp, Homo sapiens
  misc_feature: 606 for SV(C|O) and mtDNA
tatcaggcggcggcttcgaagccaaagtgatgtttggatgtaaagtgaaatattagttggcggatgaagcagatagtgaggaaagttgagccaataatgacgtgaagtccgtggaagcct

SEQ ID NO: 76708 - DNA, 120 bp, Homo sapiens
  misc_feature: 606 for SV(C|O) and mtDNA
accatgttacgacttgtctcctctatataaatgcgtaggggttttagttaaatgtcctttgaagtatacttgaggagggtgacgggcggtgtgtacgcgcttcagggccctgttcaacta

SEQ ID NO: 76709 - DNA, 120 bp, Homo sapiens
  misc_feature: 606 for SV(C|O) and mtDNA
ccctgagaatccaaaattctccgtgccacctatcacaccccatcctaaagtaaggtcagctaaataagctatcgggcccataccccgaaaatgttggttatacccttcccgtactaatta

SEQ ID NO: 76710 - DNA, 120 bp, Homo sapiens
  misc_feature: 606 for SV(C|O) and mtDNA
ctcatacccccattatgtaaaatccattgtcgcatccacctttattatcagtctcttccccacaacaatattcatgtgcctagaccaagaagttattatctcgaactgacactgagccac

SEQ ID NO: 76711 - DNA, 120 bp, Homo sapiens
  misc_feature: 606 for SV(C|O) and mtDNA
gtgatgatggaggtggagatttggtgctgtgaaattgttttaggtaatagcttttctagtcaggttaggtctaggaggagtaggggcaggttttggctcgtaagaaggcctagatagggg

SEQ ID NO: 76712 - DNA, 120 bp, Homo sapiens
  misc_feature: 606 for SV(C|O) and mtDNA
actcaccaagacctcaacccctgacccccatgcctcaggatactcctcaatagccatcgctgtagtatatccaaagacaaccatcattccccctaaataaattaaaaaaactattaaacc

SEQ ID NO: 76713 - DNA, 120 bp, Homo sapiens
  misc_feature: 606 for SV(C|O) and mtDNA
acgatggatcacaggtctatcaccctattaaccactcacgggagctctccatgcatttggtattttcgtctggggggtgtgcacgcgatagcattgcgagacgctggagccggagcaccc

SEQ ID NO: 76714 - DNA, 120 bp, Homo sapiens
  misc_feature: 606 for SV(C|O) and mtDNA
ggggccctctcagccctcctaatgacctccggcctagccatgtgatttcacttccactccataacgctcctcatactaggcctactaaccaacacactaaccatataccaatgatggcgc

SEQ ID NO: 76715 - DNA, 120 bp, Homo sapiens; identical to SEQ ID NO: 57728
  misc_feature: 606 for SV(C|O) and mtDNA

SEQ ID NO: 76716 - DNA, 120 bp, Homo sapiens
  misc_feature: 606 for SV(C|O) and mtDNA
accgttgactattctctacaaaccacaaagacattggaacactatacctattattcggcgcatgagctggagtcctaggcacagctctaagcctccttattcgagccgagctgggccagc

SEQ ID NO: 76717 - DNA, 120 bp, Homo sapiens
  misc_feature: 606 for SV(C|O) and mtDNA
gattttacataatgggggtatgagttttttttgttagggttaacgagggtggtaaggatggggggaattagggaagtcagggttagggtggttatagtagtgtgcatggttgttactttt

SEQ ID NO: 76718 - DNA, 120 bp, Homo sapiens; identical to SEQ ID NO: 57154
  misc_feature: 606 for SV(C|O) and mtDNA

SEQ ID NO: 76719 - DNA, 120 bp, Homo sapiens
  misc_feature: 606 for SV(C|O) and mtDNA
cccctagcagaaaatagcccactaatccaaactctaacactatgcttaggcgctatcaccactctgttcgcagcagtctgcgcccttacacaaaatgacatcaaaaaaatcgtagccttc

SEQ ID NO: 76720 - DNA, 120 bp, Homo sapiens; identical to SEQ ID NO: 57282
  misc_feature: 606 for SV(C|O) and mtDNA

SEQ ID NO: 76721 - DNA, 120 bp, Homo sapiens
  misc_feature: 606 for SV(C|O) and mtDNA
ctgaatcatccgctaccttcacgccaatggcgcctcaatattctttatctgcctcttcctacacatcgggcgaggcctatattacggatcatttctctactcagaaacctgaaacatcgg

SEQ ID NO: 76722 - DNA, 120 bp, Homo sapiens; identical to SEQ ID NO: 56453
  misc_feature: 606 for SV(C|O) and mtDNA

SEQ ID NO: 76723 - DNA, 120 bp, Homo sapiens
  misc_feature: 606 for SV(C|O) and mtDNA
ctacgtctattcctactgtaaatatatggtgtgctcacacgataaaccctaggaagccaattgatatcatagctcagaccatacctatgtatccaaatggttctttttttccggagtagt

SEQ ID NO: 76724 - DNA, 120 bp, Homo sapiens; identical to SEQ ID NO: 54824
  misc_feature: 606 for SV(C|O) and mtDNA

SEQ ID NO: 76725 - DNA, 120 bp, Homo sapiens
  misc_feature: 606 for SV(C|O) and mtDNA
agcaccctaatcaactggcttcaatctacttctcccgccgccgggaaaaaaggcgggagaagccccggcaggtttgaagctgcttcttcgaatttgcaattcaatatgaaaatcacctcg

SEQ ID NO: 76726 - DNA, 120 bp, Homo sapiens
  misc_feature: 606 for SV(C|O) and mtDNA
attatggtgggccatacggtagtatttagttggggcatttcactgtaaagaggtgttggttctcttaatctttaacttaaaaggttaatgctaagttagctttacagtgggctctagagg

SEQ ID NO: 76727 - DNA, 120 bp, Homo sapiens
  misc_feature: 606 for SV(C|O) and mtDNA
cctaggcgacccagacaattataccctagccaaccccttaaacacccctccccacatcaagcccgaatgatatttcctattcgcctacacaattctccgatccgtccctaacaaactagg

SEQ ID NO: 76728 - DNA, 120 bp, Homo sapiens; identical to SEQ ID NO: 57754
  misc_feature: 606 for SV(C|O) and mtDNA

SEQ ID NO: 76729 - DNA, 120 bp, Homo sapiens; identical to SEQ ID NO: 60952
  misc_feature: 606 for SV(C|O) and mtDNA

SEQ ID NO: 76730 - DNA, 120 bp, Homo sapiens; identical to SEQ ID NO: 54747
  misc_feature: 606 for SV(C|O) and mtDNA

SEQ ID NO: 76731 - DNA, 120 bp, Homo sapiens
  misc_feature: 606 for SV(C|O) and mtDNA
agccacctctagcctagccgtttactcaatcctctgatcagggtgagcatcaaactcaaactacgccctgatcggcgcactgcgagcagtagcccaaacaatctcatatgaagtcaccct

SEQ ID NO: 76732 - DNA, 120 bp, Homo sapiens; identical to SEQ ID NO: 59943
  misc_feature: 605 for SV(C|O) and mtDNA

SEQ ID NO: 76733 - DNA, 120 bp, Homo sapiens; identical to SEQ ID NO: 59777
  misc_feature: 605 for SV(C|O) and mtDNA

SEQ ID NO: 76734 - DNA, 120 bp, Homo sapiens; identical to SEQ ID NO: 58368
  misc_feature: 605 for SV(C|O) and mtDNA

SEQ ID NO: 76735 - DNA, 120 bp, Homo sapiens
  misc_feature: 605 for SV(C|O) and mtDNA
ttctactattaggacttttcgcttcgaagcgaaggcttctcaaatcatgaaaattattaatattactgctgttagagaaatgaatgagcctacagatgataggatgtttcatgtggtgta

SEQ ID NO: 76736 - DNA, 120 bp, Homo sapiens
  misc_feature: 605 for SV(C|O) and mtDNA
agcactatagttgtagcaggaatcttcttactcatccgcttccaccccctagcagaaaatagcccactaatccaaactctaacactatgcttaggcgctatcaccactctgttcgcagca

SEQ ID NO: 76737 - DNA, 120 bp, Homo sapiens
  misc_feature: 605 for SV(C|O) and mtDNA
ggtgtaaggagaagatggttaggtctacggaggctccagggtgggagtagttccctgctaagggagggtagactgttcaacctgttcctgctccggcctccactatagcagatgcgagca

SEQ ID NO: 76738 - DNA, 120 bp, Homo sapiens; identical to SEQ ID NO: 59255
  misc_feature: 605 for SV(C|O) and mtDNA

SEQ ID NO: 76739 - DNA, 120 bp, Homo sapiens
  misc_feature: 605 for SV(C|O) and mtDNA
tgaaatatgctcgtgtgtctacgtctattcctactgtaaatatatggtgtgctcacacgataaaccctaggaagccaattgatatcatagctcagaccatacctatgtatccaaatggtt

SEQ ID NO: 76740 - DNA, 120 bp, Homo sapiens
  misc_feature: 605 for SV(C|O) and mtDNA
ctaggcgacccagacaattataccctagccaaccccttaaacacccctccccacatcaagcccgaatgatatttcctattcgcctacacaattctccgatccgtccctaacaaactagga

SEQ ID NO: 76741 - DNA, 120 bp, Homo sapiens; identical to SEQ ID NO: 62965
  misc_feature: 605 for SV(C|O) and mtDNA

SEQ ID NO: 76742 - DNA, 120 bp, Homo sapiens
  misc_feature: 605 for SV(C|O) and mtDNA
tcatcctagcaataatccccatcctccatatatccaaacaacaaagcataatatttcgcccactaagccaatcactttattgactcctagccgcagacctcctcattctaacctgaatcg

SEQ ID NO: 76743 - DNA, 120 bp, Homo sapiens; identical to SEQ ID NO: 56076
  misc_feature: 605 for SV(C|O) and mtDNA

SEQ ID NO: 76744 - DNA, 120 bp, Homo sapiens
  misc_feature: 605 for SV(C|O) and mtDNA
cccagtaggttaatagtggggggtaaggcgaggttagcgaggcttgctagaagtcatcaaaaagctattagtgggagtagagtttgaagtccttgagagaggattatgatgcgactgtga

SEQ ID NO: 76745 - DNA, 120 bp, Homo sapiens
  misc_feature: 605 for SV(C|O) and mtDNA
tcacacgataaaccctaggaagccaattgatatcatagctcagaccatacctatgtatccaaatggttctttttttccggagtagtaagttacaatatgggagattattccgaagcctgg

SEQ ID NO: 76746 - DNA, 120 bp, Homo sapiens
  misc_feature: 605 for SV(C|O) and mtDNA
tattaggacttttcgcttcgaagcgaaggcttctcaaatcatgaaaattattaatattactgctgttagagaaatgaatgagcctacagatgataggatgtttcatgtggtgtatgcatc

SEQ ID NO: 76747 - DNA, 120 bp, Homo sapiens
  misc_feature: 605 for SV(C|O) and mtDNA
tagtgggctattttctgctagggggtggaagcggatgagtaagaagattcctgctacaactatagtgcttgagtggagtagggctgagactggggtggggccttctatggctgaggggag

SEQ ID NO: 76748 - DNA, 120 bp, Homo sapiens
  misc_feature: 605 for SV(C|O) and mtDNA
gcccgccatcatcctagtcctcatcgccctcccatccctgcgcatcctttacataacagacgaggtcaacgatccctcccttaccatcaaatcaattggccaccaatggtactgaaccta

SEQ ID NO: 76749 - DNA, 120 bp, Homo sapiens; identical to SEQ ID NO: 57748
  misc_feature: 605 for SV(C|O) and mtDNA

SEQ ID NO: 76750 - DNA, 120 bp, Homo sapiens
  misc_feature: 605 for SV(C|O) and mtDNA
gtggagatttggtgctgtgaaattgttttaggtaatagcttttctagtcaggttaggtctaggaggagtaggggcaggttttggctcgtaagaaggcctagataggggattgtgcggtgt

SEQ ID NO: 76751 - DNA, 120 bp, Homo sapiens
  misc_feature: 605 for SV(C|O) and mtDNA
ggtggagatttggtgctgtgaaattgttttaggtaatagcttttctagtcaggttaggtctaggaggagtaggggcaggttttggctcgtaagaaggcctagataggggattgtgcggtg

SEQ ID NO: 76752 - DNA, 120 bp, Homo sapiens
  misc_feature: 605 for SV(C|O) and mtDNA
gggtgagtggtaggaagttttttcataggaggtgtatgagttggtcgtagcggaatcgggggtatgctgttcgaattcataagaacagggaggttagaagtagggtcttggtgacaaaat

SEQ ID NO: 76753 - DNA, 120 bp, Homo sapiens
  misc_feature: 605 for SV(C|O) and mtDNA
ccagtacacttaccatgttacgacttgtctcctctatataaatgcgtaggggttttagttaaatgtcctttgaagtatacttgaggagggtgacgggcggtgtgtacgcgcttcagggcc

SEQ ID NO: 76754 - DNA, 120 bp, Homo sapiens
  misc_feature: 605 for SV(C|O) and mtDNA
agagatttggtatatgattgagatgggggctagtttttgtcatgtgagaagaagcaggccggatgtcagaggggtgccttgggtaacctctgggacccagaagtgaaagggggctattcc

SEQ ID NO: 76755 - DNA, 120 bp, Homo sapiens
  misc_feature: 605 for SV(C|O) and mtDNA
ctgactcgccacactccacggaagcaatatgaaatgatctgctgcagtgctctgagccctaggattcatctttcttttcaccgtaggcggcctgactggcattgtattagcaaactcatc

SEQ ID NO: 76756 - DNA, 120 bp, Homo sapiens
  misc_feature: 605 for SV(C|O) and mtDNA
ctgcacgacaacacataatgacccaccaatcacatgcctatcatatagtaaaacccagcccatgacccctaacaggggccctctcagccctcctaatgacctccggcctagccatgtgat

SEQ ID NO: 76757 - DNA, 120 bp, Homo sapiens; identical to SEQ ID NO: 53750
  misc_feature: 605 for SV(C|O) and mtDNA

SEQ ID NO: 76758 - DNA, 120 bp, Homo sapiens; identical to SEQ ID NO: 57883
  misc_feature: 605 for SV(C|O) and mtDNA

SEQ ID NO: 76759 - DNA, 120 bp, Homo sapiens
  misc_feature: 605 for SV(C|O) and mtDNA
accaggcgacctgcgactccttgacgttgacaatcgagtagtactcccgattgaagcccccattcgtataataattacatcacaagacgtcttgcactcatgagctgtccccacattagg

SEQ ID NO: 76760 - DNA, 120 bp, Homo sapiens
  misc_feature: 605 for SV(C|O) and mtDNA
cccagacaattataccctagccaaccccttaaacacccctccccacatcaagcccgaatgatatttcctattcgcctacacaattctccgatccgtccctaacaaactaggaggcgtcct

SEQ ID NO: 76761 - DNA, 120 bp, Homo sapiens
  misc_feature: 605 for SV(C|O) and mtDNA
atgaatcctagggctcagagcactgcagcagatcatttcatattgcttccgtggagtgtggcgagtcagctaaatactttgacgccggtggggatagcgatgattatggtagcggaggtg

SEQ ID NO: 76762 - DNA, 120 bp, Homo sapiens
  misc_feature: 605 for SV(C|O) and mtDNA
atgctcgtgtgtctacgtctattcctactgtaaatatatggtgtgctcacacgataaaccctaggaagccaattgatatcatagctcagaccatacctatgtatccaaatggttcttttt

SEQ ID NO: 76763 - DNA, 120 bp, Homo sapiens; identical to SEQ ID NO: 59896
  misc_feature: 605 for SV(C|O) and mtDNA

SEQ ID NO: 76764 - DNA, 120 bp, Homo sapiens
  misc_feature: 605 for SV(C|O) and mtDNA
accaaacgcccctcttcgtctgatccgtcctaatcacagcagtcctacttctcctatctctcccagtcctagctgctggcatcactatactactaacagaccgcaacctcaacaccacct

SEQ ID NO: 76765 - DNA, 120 bp, Homo sapiens
  misc_feature: 605 for SV(C|O) and mtDNA
actatccatcctcatcctagcaataatccccatcctccatatatccaaacaacaaagcataatatttcgcccactaagccaatcactttattgactcctagccgcagacctcctcattct

SEQ ID NO: 76766 - DNA, 120 bp, Homo sapiens
  misc_feature: 604 for SV(C|O) and mtDNA
tttgattgtgtagtaagggtggaaggtgattttatcggaatgggaggtgattcctagggggttgtttgatcccgtttcgtgcaagaataggaggtggagtgctgctagggctgcaataat

SEQ ID NO: 76767 - DNA, 120 bp, Homo sapiens
  misc_feature: 604 for SV(C|O) and mtDNA
ttgggtttttatgtactacaggtggtcaagtatttatggtaccgtacaatattcatggtggctggcagtaatgtacgaattacatagcggttgttgatgggtgagtcaatacttgggtgg

SEQ ID NO: 76768 - DNA, 120 bp, Homo sapiens
  misc_feature: 604 for SV(C|O) and mtDNA
ttgatttgatggtaagggagggatcgttgacctcgtctgttatgtaaaggatgcgcagggatgggagggcgatgaggactaggatgatggcgggcaggatagttcagacggtttctattt

SEQ ID NO: 76769 - DNA, 120 bp, Homo sapiens
  misc_feature: 604 for SV(C|O) and mtDNA
taacgtctttacgtgggtacttgcgcttactttgtagccttcatcagggtttgctgaagatggcggtatataggctgagcaagaggtggtgaggttgatcggggtttatcgattacagaa

SEQ ID NO: 76770 - DNA, 120 bp, Homo sapiens
  misc_feature: 604 for SV(C|O) and mtDNA
gttacagaaattaagtattgcaacttactgagggctttgaaggctcttggtctgtatttaacctaaatttctataagattattagtataaaaggggagataggtaggagtagcgtggtaa

SEQ ID NO: 76771 - DNA, 120 bp, Homo sapiens
  misc_feature: 604 for SV(C|O) and mtDNA
tgcacgacaacacataatgacccaccaatcacatgcctatcatatagtaaaacccagcccatgacccctaacaggggccctctcagccctcctaatgacctccggcctagccatgtgatt

SEQ ID NO: 76772 - DNA, 120 bp, Homo sapiens; identical to SEQ ID NO: 60540
  misc_feature: 604 for SV(C|O) and mtDNA

SEQ ID NO: 76773 - DNA, 120 bp, Homo sapiens
  misc_feature: 604 for SV(C|O) and mtDNA
tcgtccccatggatgacccccctcagataggggtcccttgaccaccatcctccgtgaaatcaatatcccgcacaagagtgctactctcctcgctccgggcccataacacttgggggtagc

SEQ ID NO: 76774 - DNA, 120 bp, Homo sapiens
  misc_feature: 604 for SV(C|O) and mtDNA
tcctatcatctgtaggctcattcatttctctaacagcagtaatattaataattttcatgatttgagaagccttcgcttcgaagcgaaaagtcctaatagtagaagaaccctccataaacc

SEQ ID NO: 76775 - DNA, 120 bp, Homo sapiens
  misc_feature: 604 for SV(C|O) and mtDNA
tcaactacaagaacaccaatgaccccaatacgcaaaattaaccccctaataaaattaattaaccactcattcatcgacctccccaccccatccaacatctccgcatgatgaaacttcggc

SEQ ID NO: 76776 - DNA, 120 bp, Homo sapiens
  misc_feature: 604 for SV(C|O) and mtDNA
tatagtagtgtgcatggttgttacttttatttggagttgcaccaaaatttttggggcctaagaccaatggatagctgttatcctttaaaagttgagaaagccatgttgttagacatgggg

SEQ ID NO: 76777 - DNA, 120 bp, Homo sapiens
  misc_feature: 604 for SV(C|O) and mtDNA
ataaacaacataagcttctgactcttacctccctctctcctactcctgctcgcatctgctatagtggaggccggagcaggaacaggttgaacagtctaccctcccttagcagggaactac

SEQ ID NO: 76778 - DNA, 120 bp, Homo sapiens; identical to SEQ ID NO: 62423
  misc_feature: 604 for SV(C|O) and mtDNA

SEQ ID NO: 76779 - DNA, 120 bp, Homo sapiens
  misc_feature: 604 for SV(C|O) and mtDNA
ctcaccaagacctcaacccctgacccccatgcctcaggatactcctcaatagccatcgctgtagtatatccaaagacaaccatcattccccctaaataaattaaaaaaactattaaaccc

SEQ ID NO: 76780 - DNA, 120 bp, Homo sapiens
  misc_feature: 604 for SV(C|O) and mtDNA
aacatggctttctcaacttttaaaggataacagctatccattggtcttaggccccaaaaattttggtgcaactccaaataaaagtaacaaccatgcacactactataaccaccctaaccc

SEQ ID NO: 76781 - DNA, 120 bp, Homo sapiens
  misc_feature: 604 for SV(C|O) and mtDNA
catcaccctccttaacctctacttctacctacgcctaatctactccacctcaatcacactactccccatatctaacaacgtaaaaataaaatgacagtttgaacatacaaaacccacccc

SEQ ID NO: 76782 - DNA, 120 bp, Homo sapiens
  misc_feature: 604 for SV(C|O) and mtDNA
ccatcccatacattgggacagacctagttcaatgaatctgaggaggctactcagtagacagtcccaccctcacacgattctttacctttcacttcatcttgcccttcattattgcagccc

SEQ ID NO: 76783 - DNA, 120 bp, Homo sapiens; identical to SEQ ID NO: 57081
  misc_feature: 604 for SV(C|O) and mtDNA

SEQ ID NO: 76784 - DNA, 120 bp, Homo sapiens
  misc_feature: 604 for SV(C|O) and mtDNA
ccgttgactattctctacaaaccacaaagacattggaacactatacctattattcggcgcatgagctggagtcctaggcacagctctaagcctccttattcgagccgagctgggccagcc

SEQ ID NO: 76785 - DNA, 120 bp, Homo sapiens; identical to SEQ ID NO: 60859
  misc_feature: 604 for SV(C|O) and mtDNA

SEQ ID NO: 76786 - DNA, 120 bp, Homo sapiens; identical to SEQ ID NO: 55046
  misc_feature: 604 for SV(C|O) and mtDNA

SEQ ID NO: 76787 - DNA, 120 bp, Homo sapiens
  misc_feature: 604 for SV(C|O) and mtDNA
aagcactatagttgtagcaggaatcttcttactcatccgcttccaccccctagcagaaaatagcccactaatccaaactctaacactatgcttaggcgctatcaccactctgttcgcagc

SEQ ID NO: 76788 - DNA, 120 bp, Homo sapiens
  misc_feature: 604 for SV(C|O) and mtDNA
ccgctcacacctcatatcctccctactatgcctagaaggaataatactatcactgttcattatagctactctcataaccctcaacacccactccctcttagccaatattgtgcctattgc

SEQ ID NO: 76789 - DNA, 120 bp, Homo sapiens; identical to SEQ ID NO: 56235
  misc_feature: 604 for SV(C|O) and mtDNA

SEQ ID NO: 76790 - DNA, 120 bp, Homo sapiens
  misc_feature: 604 for SV(C|O) and mtDNA
gaaccataaccaatactaccaatcaatactcatcattaataatcataatggctatagcaataaaactaggaatagccccctttcacttctgggtcccagaggttacccaaggcacccctc

SEQ ID NO: 76791 - DNA, 120 bp, Homo sapiens
  misc_feature: 604 for SV(C|O) and mtDNA
gacttcatatgagattgtttgggctactgctcgcagtgcgccgatcagggcgtagtttgagtttgatgctcaccctgatcagaggattgagtaaacggctaggctagaggtggctagaat

SEQ ID NO: 76792 - DNA, 120 bp, Homo sapiens
  misc_feature: 604 for SV(C|O) and mtDNA
atgaggtggcaagaaatgggctacattttctaccccagaaaactacgatagcccttatgaaacttaagggtcgaaggtggatttagcagtaaactgagagtagagtgcttagttgaacag

SEQ ID NO: 76793 - DNA, 120 bp, Homo sapiens; identical to SEQ ID NO: 61011
  misc_feature: 604 for SV(C|O) and mtDNA

SEQ ID NO: 76794 - DNA, 120 bp, Homo sapiens
  misc_feature: 604 for SV(C|O) and mtDNA
cctagttttattgctatagccattatgattattaatgatgagtattgattggtagtattggttatggttcattgtccggagagtatattgttgaagaggatagctattagaaggattatg

SEQ ID NO: 76795 - DNA, 120 bp, Homo sapiens
  misc_feature: 604 for SV(C|O) and mtDNA
ccctagcagaaaatagcccactaatccaaactctaacactatgcttaggcgctatcaccactctgttcgcagcagtctgcgcccttacacaaaatgacatcaaaaaaatcgtagccttct

SEQ ID NO: 76796 - DNA, 120 bp, Homo sapiens
  misc_feature: 604 for SV(C|O) and mtDNA
cccgccgccgggaaaaaaggcgggagaagccccggcaggtttgaagctgcttcttcgaatttgcaattcaatatgaaaatcacctcggagctggtaaaaagaggcctaacccctgtcttt

SEQ ID NO: 76797 - DNA, 120 bp, Homo sapiens
  misc_feature: 604 for SV(C|O) and mtDNA
catggctttctcaacttttaaaggataacagctatccattggtcttaggccccaaaaattttggtgcaactccaaataaaagtaacaaccatgcacactactataaccaccctaaccctg

SEQ ID NO: 76798 - DNA, 120 bp, Homo sapiens
  misc_feature: 604 for SV(C|O) and mtDNA
cagtaggttaatagtggggggtaaggcgaggttagcgaggcttgctagaagtcatcaaaaagctattagtgggagtagagtttgaagtccttgagagaggattatgatgcgactgtgagt

SEQ ID NO: 76799 - DNA, 120 bp, Homo sapiens
  misc_feature: 604 for SV(C|O) and mtDNA
aactctaacactatgcttaggcgctatcaccactctgttcgcagcagtctgcgcccttacacaaaatgacatcaaaaaaatcgtagccttctccacttcaagtcaactaggactcataat

SEQ ID NO: 76800 - DNA, 120 bp, Homo sapiens; identical to SEQ ID NO: 60747
  misc_feature: 604 for SV(C|O) and mtDNA

SEQ ID NO: 76801 - DNA, 120 bp, Homo sapiens
  misc_feature: 603 for SV(C|O) and mtDNA
ttaggacttttcgcttcgaagcgaaggcttctcaaatcatgaaaattattaatattactgctgttagagaaatgaatgagcctacagatgataggatgtttcatgtggtgtatgcatcgg

SEQ ID NO: 76802 - DNA, 120 bp, Homo sapiens
  misc_feature: 603 for SV(C|O) and mtDNA
gcaactccaaataaaagtaacaaccatgcacactactataaccaccctaaccctgacttccctaattccccccatccttaccaccctcgttaaccctaacaaaaaaaactcataccccca

SEQ ID NO: 76803 - DNA, 120 bp, Homo sapiens
  misc_feature: 603 for SV(C|O) and mtDNA
tgctgcagtgctctgagccctaggattcatctttcttttcaccgtaggcggcctgactggcattgtattagcaaactcatcactagacatcgtactacacgacacgtactacgttgtagc

SEQ ID NO: 76804 - DNA, 120 bp, Homo sapiens
  misc_feature: 603 for SV(C|O) and mtDNA
tgactcgccacactccacggaagcaatatgaaatgatctgctgcagtgctctgagccctaggattcatctttcttttcaccgtaggcggcctgactggcattgtattagcaaactcatca

SEQ ID NO: 76805 - DNA, 120 bp, Homo sapiens
  misc_feature: 603 for SV(C|O) and mtDNA
tcggaggacaaccagtaagctacccttttaccatcattggacaagtagcatccgtactatacttcacaacaatcctaatcctaataccaactatctccctaattgaaaacaaaatactca

SEQ ID NO: 76806 - DNA, 120 bp, Homo sapiens
  misc_feature: 603 for SV(C|O) and mtDNA
tctttgattgtgtagtaagggtggaaggtgattttatcggaatgggaggtgattcctagggggttgtttgatcccgtttcgtgcaagaataggaggtggagtgctgctagggctgcaata

SEQ ID NO: 76807 - DNA, 120 bp, Homo sapiens
  misc_feature: 603 for SV(C|O) and mtDNA
cctcgtagtaacagccattctcatccaaaccccctgaagcttcaccggcgcagtcattctcataatcgcccacggacttacatcctcattactattctgcctagcaaactcaaactacga

SEQ ID NO: 76808 - DNA, 120 bp, Homo sapiens
  misc_feature: 603 for SV(C|O) and mtDNA
cagtttgggtcttagctattgtgtgttcagatatgttaaagccactttcgtagtctattttgtgtcagctggagttttttacaactcaggtgagttttagctttattggggagggggtga

SEQ ID NO: 76809 - DNA, 120 bp, Homo sapiens
  misc_feature: 603 for SV(C|O) and mtDNA
tatgcttaggcgctatcaccactctgttcgcagcagtctgcgcccttacacaaaatgacatcaaaaaaatcgtagccttctccacttcaagtcaactaggactcataatagttacaatcg

SEQ ID NO: 76810 - DNA, 120 bp, Homo sapiens
  misc_feature: 603 for SV(C|O) and mtDNA
taggcctagtatgaggagcgttatggagtggaagtgaaatcacatggctaggccggaggtcattaggagggctgagagggcccctgttaggggtcatgggctgggttttactatatgata

SEQ ID NO: 76811 - DNA, 120 bp, Homo sapiens
  misc_feature: 603 for SV(C|O) and mtDNA
gtccccatggatgacccccctcagataggggtcccttgaccaccatcctccgtgaaatcaatatcccgcacaagagtgctactctcctcgctccgggcccataacacttgggggtagcta

SEQ ID NO: 76812 - DNA, 120 bp, Homo sapiens; identical to SEQ ID NO: 56804
  misc_feature: 603 for SV(C|O) and mtDNA

SEQ ID NO: 76813 - DNA, 120 bp, Homo sapiens
  misc_feature: 603 for SV(C|O) and mtDNA
taccaaacgcccctcttcgtctgatccgtcctaatcacagcagtcctacttctcctatctctcccagtcctagctgctggcatcactatactactaacagaccgcaacctcaacaccacc

SEQ ID NO: 76814 - DNA, 120 bp, Homo sapiens
  misc_feature: 603 for SV(C|O) and mtDNA
ccgccgccgggaaaaaaggcgggagaagccccggcaggtttgaagctgcttcttcgaatttgcaattcaatatgaaaatcacctcggagctggtaaaaagaggcctaacccctgtcttta

SEQ ID NO: 76815 - DNA, 120 bp, Homo sapiens
  misc_feature: 603 for SV(C|O) and mtDNA
taaacaacataagcttctgactcttacctccctctctcctactcctgctcgcatctgctatagtggaggccggagcaggaacaggttgaacagtctaccctcccttagcagggaactact

SEQ ID NO: 76816 - DNA, 120 bp, Homo sapiens
  misc_feature: 603 for SV(C|O) and mtDNA
ccatgaggtggcaagaaatgggctacattttctaccccagaaaactacgatagcccttatgaaacttaagggtcgaaggtggatttagcagtaaactgagagtagagtgcttagttgaac

SEQ ID NO: 76817 - DNA, 120 bp, Homo sapiens; identical to SEQ ID NO: 63032
  misc_feature: 603 for SV(C|O) and mtDNA

SEQ ID NO: 76818 - DNA, 120 bp, Homo sapiens; identical to SEQ ID NO: 61064
  misc_feature: 603 for SV(C|O) and mtDNA

SEQ ID NO: 76819 - DNA, 120 bp, Homo sapiens
  misc_feature: 603 for SV(C|O) and mtDNA
gtctttgattgtgtagtaagggtggaaggtgattttatcggaatgggaggtgattcctagggggttgtttgatcccgtttcgtgcaagaataggaggtggagtgctgctagggctgcaat

SEQ ID NO: 76820 - DNA, 120 bp, Homo sapiens; identical to SEQ ID NO: 62971
  misc_feature: 603 for SV(C|O) and mtDNA

SEQ ID NO: 76821 - DNA, 120 bp, Homo sapiens
  misc_feature: 603 for SV(C|O) and mtDNA
caatgaaccataaccaatactaccaatcaatactcatcattaataatcataatggctatagcaataaaactaggaatagccccctttcacttctgggtcccagaggttacccaaggcacc

SEQ ID NO: 76822 - DNA, 120 bp, Homo sapiens
  misc_feature: 603 for SV(C|O) and mtDNA
ggtgacttcatatgagattgtttgggctactgctcgcagtgcgccgatcagggcgtagtttgagtttgatgctcaccctgatcagaggattgagtaaacggctaggctagaggtggctag

SEQ ID NO: 76823 - DNA, 120 bp, Homo sapiens
  misc_feature: 603 for SV(C|O) and mtDNA
cctaatagtagaagaaccctccataaacctggagtgactatatggatgccccccaccctaccacacattcgaagaacccgtatacataaaatctagacaaaaaaggaaggaatcgaaccc

SEQ ID NO: 76824 - DNA, 120 bp, Homo sapiens
  misc_feature: 603 for SV(C|O) and mtDNA
atgaaccataaccaatactaccaatcaatactcatcattaataatcataatggctatagcaataaaactaggaatagccccctttcacttctgggtcccagaggttacccaaggcacccc

SEQ ID NO: 76825 - DNA, 120 bp, Homo sapiens
  misc_feature: 603 for SV(C|O) and mtDNA
gggccctctcagccctcctaatgacctccggcctagccatgtgatttcacttccactccataacgctcctcatactaggcctactaaccaacacactaaccatataccaatgatggcgcg

SEQ ID NO: 76826 - DNA, 120 bp, Homo sapiens; identical to SEQ ID NO: 56448
  misc_feature: 603 for SV(C|O) and mtDNA

SEQ ID NO: 76827 - DNA, 120 bp, Homo sapiens
  misc_feature: 603 for SV(C|O) and mtDNA
gctgcagtgctctgagccctaggattcatctttcttttcaccgtaggcggcctgactggcattgtattagcaaactcatcactagacatcgtactacacgacacgtactacgttgtagct

SEQ ID NO: 76828 - DNA, 120 bp, Homo sapiens
  misc_feature: 603 for SV(C|O) and mtDNA
gctcgtgtgtctacgtctattcctactgtaaatatatggtgtgctcacacgataaaccctaggaagccaattgatatcatagctcagaccatacctatgtatccaaatggttcttttttt

SEQ ID NO: 76829 - DNA, 120 bp, Homo sapiens
  misc_feature: 603 for SV(C|O) and mtDNA
aaccaatactaccaatcaatactcatcattaataatcataatggctatagcaataaaactaggaatagccccctttcacttctgggtcccagaggttacccaaggcacccctctgacatc

SEQ ID NO: 76830 - DNA, 120 bp, Homo sapiens
  misc_feature: 603 for SV(C|O) and mtDNA
gatgaatcctagggctcagagcactgcagcagatcatttcatattgcttccgtggagtgtggcgagtcagctaaatactttgacgccggtggggatagcgatgattatggtagcggaggt

SEQ ID NO: 76831 - DNA, 120 bp, Homo sapiens
  misc_feature: 603 for SV(C|O) and mtDNA
gagtatgggggtaattatggtgggccatacggtagtatttagttggggcatttcactgtaaagaggtgttggttctcttaatctttaacttaaaaggttaatgctaagttagctttacag

SEQ ID NO: 76832 - DNA, 120 bp, Homo sapiens; identical to SEQ ID NO: 59175
  misc_feature: 603 for SV(C|O) and mtDNA

SEQ ID NO: 76833 - DNA, 120 bp, Homo sapiens
  misc_feature: 603 for SV(C|O) and mtDNA
gacaggtggtgtgtggtggccttggtatgtgctttctcgtgttacatcgcgccatcattggtatatggttagtgtgttggttagtaggcctagtatgaggagcgttatggagtggaagtg

SEQ ID NO: 76834 - DNA, 120 bp, Homo sapiens; identical to SEQ ID NO: 58035
  misc_feature: 603 for SV(C|O) and mtDNA

SEQ ID NO: 76835 - DNA, 120 bp, Homo sapiens
  misc_feature: 603 for SV(C|O) and mtDNA
atcaatactcatcattaataatcataatggctatagcaataaaactaggaatagccccctttcacttctgggtcccagaggttacccaaggcacccctctgacatccggcctgcttcttc

SEQ ID NO: 76836 - DNA, 120 bp, Homo sapiens
  misc_feature: 603 for SV(C|O) and mtDNA
gaaatatgctcgtgtgtctacgtctattcctactgtaaatatatggtgtgctcacacgataaaccctaggaagccaattgatatcatagctcagaccatacctatgtatccaaatggttc

SEQ ID NO: 76837 - DNA, 120 bp, Homo sapiens
  misc_feature: 603 for SV(C|O) and mtDNA
ctatctacttcaaattcctccctgtacgaaaggacaagagaaataaggcctacttcacaaagcgccttcccccgtaaatgatatcatctcaacttagtattatacccacacccacccaag

SEQ ID NO: 76838 - DNA, 120 bp, Homo sapiens
  misc_feature: 603 for SV(C|O) and mtDNA
cgacaatggattttacataatgggggtatgagttttttttgttagggttaacgagggtggtaaggatggggggaattagggaagtcagggttagggtggttatagtagtgtgcatggttg

SEQ ID NO: 76839 - DNA, 120 bp, Homo sapiens; identical to SEQ ID NO: 55331
  misc_feature: 603 for SV(C|O) and mtDNA

SEQ ID NO: 76840 - DNA, 120 bp, Homo sapiens; identical to SEQ ID NO: 52830
  misc_feature: 603 for SV(C|O) and mtDNA

SEQ ID NO: 76841 - DNA, 120 bp, Homo sapiens
  misc_feature: 603 for SV(C|O) and mtDNA
aggacttttcgcttcgaagcgaaggcttctcaaatcatgaaaattattaatattactgctgttagagaaatgaatgagcctacagatgataggatgtttcatgtggtgtatgcatcgggg

SEQ ID NO: 76842 - DNA, 120 bp, Homo sapiens
  misc_feature: 603 for SV(C|O) and mtDNA
catcctcatcctagcaataatccccatcctccatatatccaaacaacaaagcataatatttcgcccactaagccaatcactttattgactcctagccgcagacctcctcattctaacctg

SEQ ID NO: 76843 - DNA, 120 bp, Homo sapiens; identical to SEQ ID NO: 56884
  misc_feature: 603 for SV(C|O) and mtDNA

SEQ ID NO: 76844 - DNA, 120 bp, Homo sapiens
  misc_feature: 603 for SV(C|O) and mtDNA
accataaccaatactaccaatcaatactcatcattaataatcataatggctatagcaataaaactaggaatagccccctttcacttctgggtcccagaggttacccaaggcacccctctg

SEQ ID NO: 76845 - DNA, 120 bp, Homo sapiens; identical to SEQ ID NO: 60955
  misc_feature: 603 for SV(C|O) and mtDNA

SEQ ID NO: 76846 - DNA, 120 bp, Homo sapiens; identical to SEQ ID NO: 60555
  misc_feature: 603 for SV(C|O) and mtDNA

SEQ ID NO: 76847 - DNA, 120 bp, Homo sapiens
  misc_feature: 603 for SV(C|O) and mtDNA
agtggcgttggcttgccatgattgtgaggggtaggagtcaggtagttagtattaggaggggggttgttagggggtcggaggaaaaggttggggaacagctaaataggttgttgttgattt

SEQ ID NO: 76848 - DNA, 120 bp, Homo sapiens; identical to SEQ ID NO: 59897
  misc_feature: 603 for SV(C|O) and mtDNA

SEQ ID NO: 76849 - DNA, 120 bp, Homo sapiens; identical to SEQ ID NO: 54337
  misc_feature: 603 for SV(C|O) and mtDNA

SEQ ID NO: 76850 - DNA, 120 bp, Homo sapiens
  misc_feature: 603 for SV(C|O) and mtDNA
aagtggcgttggcttgccatgattgtgaggggtaggagtcaggtagttagtattaggaggggggttgttagggggtcggaggaaaaggttggggaacagctaaataggttgttgttgatt

SEQ ID NO: 76851 - DNA, 120 bp, Homo sapiens
  misc_feature: 602 for SV(C|O) and mtDNA
ggaggacaaccagtaagctacccttttaccatcattggacaagtagcatccgtactatacttcacaacaatcctaatcctaataccaactatctccctaattgaaaacaaaatactcaaa

SEQ ID NO: 76852 - DNA, 120 bp, Homo sapiens
  misc_feature: 602 for SV(C|O) and mtDNA
cactatgcttaggcgctatcaccactctgttcgcagcagtctgcgcccttacacaaaatgacatcaaaaaaatcgtagccttctccacttcaagtcaactaggactcataatagttacaa

SEQ ID NO: 76853 - DNA, 120 bp, Homo sapiens
  misc_feature: 602 for SV(C|O) and mtDNA
ttgggctactgctcgcagtgcgccgatcagggcgtagtttgagtttgatgctcaccctgatcagaggattgagtaaacggctaggctagaggtggctagaataaataggaggcctaggtt

SEQ ID NO: 76854 - DNA, 120 bp, Homo sapiens
  misc_feature: 602 for SV(C|O) and mtDNA
ttgggcagtgagagtgagtagtagaatgtttagtgagcctagggtgttgtgagtgtaaattagtgcgatgagtaggggaagggagcctactagggtgtagaataggaagtatgtgcctgc

SEQ ID NO: 76855 - DNA, 120 bp, Homo sapiens
  misc_feature: 602 for SV(C|O) and mtDNA
tgacttcatatgagattgtttgggctactgctcgcagtgcgccgatcagggcgtagtttgagtttgatgctcaccctgatcagaggattgagtaaacggctaggctagaggtggctagaa

SEQ ID NO: 76856 - DNA, 120 bp, Homo sapiens; identical to SEQ ID NO: 61054
  misc_feature: 602 for SV(C|O) and mtDNA

SEQ ID NO: 76857 - DNA, 120 bp, Homo sapiens
  misc_feature: 602 for SV(C|O) and mtDNA
ttacagaaattaagtattgcaacttactgagggctttgaaggctcttggtctgtatttaacctaaatttctataagattattagtataaaaggggagataggtaggagtagcgtggtaag

SEQ ID NO: 76858 - DNA, 120 bp, Homo sapiens
  misc_feature: 602 for SV(C|O) and mtDNA
catgaggtggcaagaaatgggctacattttctaccccagaaaactacgatagcccttatgaaacttaagggtcgaaggtggatttagcagtaaactgagagtagagtgcttagttgaaca

SEQ ID NO: 76859 - DNA, 120 bp, Homo sapiens; identical to SEQ ID NO: 57477
  misc_feature: 602 for SV(C|O) and mtDNA

SEQ ID NO: 76860 - DNA, 120 bp, Homo sapiens
  misc_feature: 602 for SV(C|O) and mtDNA
tggtgtgctcacacgataaaccctaggaagccaattgatatcatagctcagaccatacctatgtatccaaatggttctttttttccggagtagtaagttacaatatgggagattattccg

SEQ ID NO: 76861 - DNA, 120 bp, Homo sapiens; identical to SEQ ID NO: 62161
  misc_feature: 602 for SV(C|O) and mtDNA

SEQ ID NO: 76862 - DNA, 120 bp, Homo sapiens
  misc_feature: 602 for SV(C|O) and mtDNA
tgggcagtgagagtgagtagtagaatgtttagtgagcctagggtgttgtgagtgtaaattagtgcgatgagtaggggaagggagcctactagggtgtagaataggaagtatgtgcctgcg

SEQ ID NO: 76863 - DNA, 120 bp, Homo sapiens
  misc_feature: 602 for SV(C|O) and mtDNA
gaaacatcggcattatcctcctgcttgcaactatagcaacagccttcataggctatgtcctcccgtgaggccaaatatcattctgaggggccacagtaattacaaacttactatccgcca

SEQ ID NO: 76864 - DNA, 120 bp, Homo sapiens; identical to SEQ ID NO: 60688
  misc_feature: 602 for SV(C|O) and mtDNA

SEQ ID NO: 76865 - DNA, 120 bp, Homo sapiens; identical to SEQ ID NO: 60400
  misc_feature: 602 for SV(C|O) and mtDNA

SEQ ID NO: 76866 - DNA, 120 bp, Homo sapiens
  misc_feature: 602 for SV(C|O) and mtDNA
tgcatggttgttacttttatttggagttgcaccaaaatttttggggcctaagaccaatggatagctgttatcctttaaaagttgagaaagccatgttgttagacatgggggcatgagtta

SEQ ID NO: 76867 - DNA, 120 bp, Homo sapiens; identical to SEQ ID NO: 58016
  misc_feature: 602 for SV(C|O) and mtDNA

SEQ ID NO: 76868 - DNA, 120 bp, Homo sapiens
  misc_feature: 602 for SV(C|O) and mtDNA
tctaacactatgcttaggcgctatcaccactctgttcgcagcagtctgcgcccttacacaaaatgacatcaaaaaaatcgtagccttctccacttcaagtcaactaggactcataatagt

SEQ ID NO: 76869 - DNA, 120 bp, Homo sapiens
  misc_feature: 602 for SV(C|O) and mtDNA
aaaaactcatacccccattatgtaaaatccattgtcgcatccacctttattatcagtctcttccccacaacaatattcatgtgcctagaccaagaagttattatctcgaactgacactga

SEQ ID NO: 76870 - DNA, 120 bp, Homo sapiens
  misc_feature: 602 for SV(C|O) and mtDNA
tattggtgcgggggctttgtatgattatgggcgttgattagtagtagttactggttgaacattgtttgttggtgtatatattgtaattgagattgctcgggggaataggttatgtgatta

SEQ ID NO: 76871 - DNA, 120 bp, Homo sapiens
  misc_feature: 602 for SV(C|O) and mtDNA
tatggtgtgctcacacgataaaccctaggaagccaattgatatcatagctcagaccatacctatgtatccaaatggttctttttttccggagtagtaagttacaatatgggagattattc

SEQ ID NO: 76872 - DNA, 120 bp, Homo sapiens
  misc_feature: 602 for SV(C|O) and mtDNA
tatattcttatcctaccaggcttcggaataatctcccatattgtaacttactactccggaaaaaaagaaccatttggatacataggtatggtctgagctatgatatcaattggcttccta

SEQ ID NO: 76873 - DNA, 120 bp, Homo sapiens
  misc_feature: 602 for SV(C|O) and mtDNA
taccccttccttgtactatccctatgaggcataattataacaagctccatctgcctacgacaaacagacctaaaatcgctcattgcatactcttcaatcagccacatagccctcgtagta

SEQ ID NO: 76874 - DNA, 120 bp, Homo sapiens
  misc_feature: 602 for SV(C|O) and mtDNA
tactaccaatcaatactcatcattaataatcataatggctatagcaataaaactaggaatagccccctttcacttctgggtcccagaggttacccaaggcacccctctgacatccggcct

SEQ ID NO: 76875 - DNA, 120 bp, Homo sapiens
  misc_feature: 602 for SV(C|O) and mtDNA
taccatgttacgacttgtctcctctatataaatgcgtaggggttttagttaaatgtcctttgaagtatacttgaggagggtgacgggcggtgtgtacgcgcttcagggccctgttcaact

SEQ ID NO: 76876 - DNA, 120 bp, Homo sapiens
  misc_feature: 602 for SV(C|O) and mtDNA
acacgataaaccctaggaagccaattgatatcatagctcagaccatacctatgtatccaaatggttctttttttccggagtagtaagttacaatatgggagattattccgaagcctggta

SEQ ID NO: 76877 - DNA, 120 bp, Homo sapiens
  misc_feature: 602 for SV(C|O) and mtDNA
gtgaaatatgctcgtgtgtctacgtctattcctactgtaaatatatggtgtgctcacacgataaaccctaggaagccaattgatatcatagctcagaccatacctatgtatccaaatggt

SEQ ID NO: 76878 - DNA, 120 bp, Homo sapiens
  misc_feature: 602 for SV(C|O) and mtDNA
gtaggttaatagtggggggtaaggcgaggttagcgaggcttgctagaagtcatcaaaaagctattagtgggagtagagtttgaagtccttgagagaggattatgatgcgactgtgagtgc

SEQ ID NO: 76879 - DNA, 120 bp, Homo sapiens
  misc_feature: 602 for SV(C|O) and mtDNA
gggcaggttttggctcgtaagaaggcctagataggggattgtgcggtgtgtgatggtagggtagaatccgagtatgttggagaaataaaatgtgcatagtggggattttattttaagttt

SEQ ID NO: 76880 - DNA, 120 bp, Homo sapiens
  misc_feature: 602 for SV(C|O) and mtDNA
atagccccctttcacttctgggtcccagaggttacccaaggcacccctctgacatccggcctgcttcttctcacatgacaaaaactagcccccatctcaatcatataccaaatctctccc

SEQ ID NO: 76881 - DNA, 120 bp, Homo sapiens
  misc_feature: 602 for SV(C|O) and mtDNA
ggattagtgggctattttctgctagggggtggaagcggatgagtaagaagattcctgctacaactatagtgcttgagtggagtagggctgagactggggtggggccttctatggctgagg

SEQ ID NO: 76882 - DNA, 120 bp, Homo sapiens; identical to SEQ ID NO: 60141
  misc_feature: 602 for SV(C|O) and mtDNA

SEQ ID NO: 76883 - DNA, 120 bp, Homo sapiens
  misc_feature: 602 for SV(C|O) and mtDNA
ctatgcttaggcgctatcaccactctgttcgcagcagtctgcgcccttacacaaaatgacatcaaaaaaatcgtagccttctccacttcaagtcaactaggactcataatagttacaatc

SEQ ID NO: 76884 - DNA, 120 bp, Homo sapiens
  misc_feature: 602 for SV(C|O) and mtDNA
acccaagtattgactcacccatcaacaaccgctatgtaattcgtacattactgccagccaccatgaatattgtacggtaccataaatacttgaccacctgtagtacataaaaacccaatc

SEQ ID NO: 76885 - DNA, 120 bp, Homo sapiens
  misc_feature: 602 for SV(C|O) and mtDNA
agaccctatggagctttaatttattaatgcaaacagtacctaacaaacccacaggtcctaaactaccaaacctgcattaaaaatttcggttggggcgacctcggagcagaacccaacctc

SEQ ID NO: 76886 - DNA, 120 bp, Homo sapiens
  misc_feature: 602 for SV(C|O) and mtDNA
agaaaatagcccactaatccaaactctaacactatgcttaggcgctatcaccactctgttcgcagcagtctgcgcccttacacaaaatgacatcaaaaaaatcgtagccttctccacttc

SEQ ID NO: 76887 - DNA, 120 bp, Homo sapiens; identical to SEQ ID NO: 58666
  misc_feature: 602 for SV(C|O) and mtDNA

SEQ ID NO: 76888 - DNA, 120 bp, Homo sapiens
  misc_feature: 602 for SV(C|O) and mtDNA
cccactgatgttcgccgaccgttgactattctctacaaaccacaaagacattggaacactatacctattattcggcgcatgagctggagtcctaggcacagctctaagcctccttattcg

SEQ ID NO: 76889 - DNA, 120 bp, Homo sapiens
  misc_feature: 602 for SV(C|O) and mtDNA
cacacgataaaccctaggaagccaattgatatcatagctcagaccatacctatgtatccaaatggttctttttttccggagtagtaagttacaatatgggagattattccgaagcctggt

SEQ ID NO: 76890 - DNA, 120 bp, Homo sapiens
  misc_feature: 602 for SV(C|O) and mtDNA
atcccccgcccgcgtccctttctccataaaattcttcttagtagctattaccttcttattatttgatctagaaattgccctccttttacccctaccatgagccctacaaacaactaacct

SEQ ID NO: 76891 - DNA, 120 bp, Homo sapiens; identical to SEQ ID NO: 61017
  misc_feature: 602 for SV(C|O) and mtDNA

SEQ ID NO: 76892 - DNA, 120 bp, Homo sapiens; identical to SEQ ID NO: 53971
  misc_feature: 602 for SV(C|O) and mtDNA

SEQ ID NO: 76893 - DNA, 120 bp, Homo sapiens; identical to SEQ ID NO: 60121
  misc_feature: 601 for SV(C|O) and mtDNA

SEQ ID NO: 76894 - DNA, 120 bp, Homo sapiens
  misc_feature: 601 for SV(C|O) and mtDNA
tttgggctactgctcgcagtgcgccgatcagggcgtagtttgagtttgatgctcaccctgatcagaggattgagtaaacggctaggctagaggtggctagaataaataggaggcctaggt

SEQ ID NO: 76895 - DNA, 120 bp, Homo sapiens; identical to SEQ ID NO: 62953
  misc_feature: 601 for SV(C|O) and mtDNA

SEQ ID NO: 76896 - DNA, 120 bp, Homo sapiens; identical to SEQ ID NO: 62958
  misc_feature: 601 for SV(C|O) and mtDNA

SEQ ID NO: 76897 - DNA, 120 bp, Homo sapiens; identical to SEQ ID NO: 62959
  misc_feature: 601 for SV(C|O) and mtDNA

SEQ ID NO: 76898 - DNA, 120 bp, Homo sapiens
  misc_feature: 601 for SV(C|O) and mtDNA
gattgtgtagtaagggtggaaggtgattttatcggaatgggaggtgattcctagggggttgtttgatcccgtttcgtgcaagaataggaggtggagtgctgctagggctgcaataatgaa

SEQ ID NO: 76899 - DNA, 120 bp, Homo sapiens; identical to SEQ ID NO: 61608
  misc_feature: 601 for SV(C|O) and mtDNA

SEQ ID NO: 76900 - DNA, 120 bp, Homo sapiens
  misc_feature: 601 for SV(C|O) and mtDNA
ttatattcttatcctaccaggcttcggaataatctcccatattgtaacttactactccggaaaaaaagaaccatttggatacataggtatggtctgagctatgatatcaattggcttcct

SEQ ID NO: 76901 - DNA, 120 bp, Homo sapiens
  misc_feature: 601 for SV(C|O) and mtDNA
ttatagtagtgtgcatggttgttacttttatttggagttgcaccaaaatttttggggcctaagaccaatggatagctgttatcctttaaaagttgagaaagccatgttgttagacatggg

SEQ ID NO: 76902 - DNA, 120 bp, Homo sapiens; identical to SEQ ID NO: 62461
  misc_feature: 601 for SV(C|O) and mtDNA

SEQ ID NO: 76903 - DNA, 120 bp, Homo sapiens
  misc_feature: 601 for SV(C|O) and mtDNA
tggtgtgtggtggccttggtatgtgctttctcgtgttacatcgcgccatcattggtatatggttagtgtgttggttagtaggcctagtatgaggagcgttatggagtggaagtgaaatca

SEQ ID NO: 76904 - DNA, 120 bp, Homo sapiens
  misc_feature: 601 for SV(C|O) and mtDNA
cattcctaatgcttaccgaacgaaaaattctaggctatatacaactacgcaaaggccccaacgttgtaggcccctacgggctactacaacccttcgctgacgccataaaactcttcacca

SEQ ID NO: 76905 - DNA, 120 bp, Homo sapiens; identical to SEQ ID NO: 54615
  misc_feature: 601 for SV(C|O) and mtDNA

SEQ ID NO: 76906 - DNA, 120 bp, Homo sapiens; identical to SEQ ID NO: 60961
  misc_feature: 601 for SV(C|O) and mtDNA

SEQ ID NO: 76907 - DNA, 120 bp, Homo sapiens
  misc_feature: 601 for SV(C|O) and mtDNA
actattaggacttttcgcttcgaagcgaaggcttctcaaatcatgaaaattattaatattactgctgttagagaaatgaatgagcctacagatgataggatgtttcatgtggtgtatgca

SEQ ID NO: 76908 - DNA, 120 bp, Homo sapiens; identical to SEQ ID NO: 59305
  misc_feature: 601 for SV(C|O) and mtDNA

SEQ ID NO: 76909 - DNA, 120 bp, Homo sapiens; identical to SEQ ID NO: 62962
  misc_feature: 601 for SV(C|O) and mtDNA

SEQ ID NO: 76910 - DNA, 120 bp, Homo sapiens; identical to SEQ ID NO: 59398
  misc_feature: 601 for SV(C|O) and mtDNA

SEQ ID NO: 76911 - DNA, 120 bp, Homo sapiens
  misc_feature: 601 for SV(C|O) and mtDNA
ctatgaaggctgttgctatagttgcaagcaggaggataatgccgatgtttcaggtttctgagtagagaaatgatccgtaatataggcctcgcccgatgtgtaggaagaggcagataaaga

SEQ ID NO: 76912 - DNA, 120 bp, Homo sapiens; identical to SEQ ID NO: 61323
  misc_feature: 601 for SV(C|O) and mtDNA

SEQ ID NO: 76913 - DNA, 120 bp, Homo sapiens; identical to SEQ ID NO: 61548
  misc_feature: 601 for SV(C|O) and mtDNA

SEQ ID NO: 76914 - DNA, 120 bp, Homo sapiens
  misc_feature: 601 for SV(C|O) and mtDNA
tcccgccgccgggaaaaaaggcgggagaagccccggcaggtttgaagctgcttcttcgaatttgcaattcaatatgaaaatcacctcggagctggtaaaaagaggcctaacccctgtctt

SEQ ID NO: 76915 - DNA, 120 bp, Homo sapiens; identical to SEQ ID NO: 58286
  misc_feature: 601 for SV(C|O) and mtDNA

SEQ ID NO: 76916 - DNA, 120 bp, Homo sapiens; identical to SEQ ID NO: 56372
  misc_feature: 601 for SV(C|O) and mtDNA

SEQ ID NO: 76917 - DNA, 120 bp, Homo sapiens
  misc_feature: 601 for SV(C|O) and mtDNA
tattctcaccagacctcctaggcgacccagacaattataccctagccaaccccttaaacacccctccccacatcaagcccgaatgatatttcctattcgcctacacaattctccgatccg

SEQ ID NO: 76918 - DNA, 120 bp, Homo sapiens
  misc_feature: 601 for SV(C|O) and mtDNA
tagaaaccgtctgaactatcctgcccgccatcatcctagtcctcatcgccctcccatccctgcgcatcctttacataacagacgaggtcaacgatccctcccttaccatcaaatcaattg

SEQ ID NO: 76919 - DNA, 120 bp, Homo sapiens
  misc_feature: 601 for SV(C|O) and mtDNA
ggggttaggcctctttttaccagctccgaggtgattttcatattgaattgcaaattcgaagaagcagcttcaaacctgccggggcttctcccgccttttttcccggcggcgggagaagta

SEQ ID NO: 76920 - DNA, 120 bp, Homo sapiens; identical to SEQ ID NO: 53484
  misc_feature: 601 for SV(C|O) and mtDNA

SEQ ID NO: 76921 - DNA, 120 bp, Homo sapiens; identical to SEQ ID NO: 53265
  misc_feature: 601 for SV(C|O) and mtDNA

SEQ ID NO: 76922 - DNA, 120 bp, Homo sapiens; identical to SEQ ID NO: 61530
  misc_feature: 601 for SV(C|O) and mtDNA

SEQ ID NO: 76923 - DNA, 120 bp, Homo sapiens
  misc_feature: 601 for SV(C|O) and mtDNA
taatagtagaagaaccctccataaacctggagtgactatatggatgccccccaccctaccacacattcgaagaacccgtatacataaaatctagacaaaaaaggaaggaatcgaaccccc

SEQ ID NO: 76924 - DNA, 120 bp, Homo sapiens
  misc_feature: 601 for SV(C|O) and mtDNA
atcctatcatctgtaggctcattcatttctctaacagcagtaatattaataattttcatgatttgagaagccttcgcttcgaagcgaaaagtcctaatagtagaagaaccctccataaac

SEQ ID NO: 76925 - DNA, 120 bp, Homo sapiens
  misc_feature: 601 for SV(C|O) and mtDNA
gttagggggtcggaggaaaaggttggggaacagctaaataggttgttgttgatttggttaaaaaatagtagagggatgatgctaataattaggctgtgggtggttgtgttgattcaaatt

SEQ ID NO: 76926 - DNA, 120 bp, Homo sapiens
  misc_feature: 601 for SV(C|O) and mtDNA
gtgtaaggagaagatggttaggtctacggaggctccagggtgggagtagttccctgctaagggagggtagactgttcaacctgttcctgctccggcctccactatagcagatgcgagcag

SEQ ID NO: 76927 - DNA, 120 bp, Homo sapiens
  misc_feature: 601 for SV(C|O) and mtDNA
gtatcaggcggcggcttcgaagccaaagtgatgtttggatgtaaagtgaaatattagttggcggatgaagcagatagtgaggaaagttgagccaataatgacgtgaagtccgtggaagcc

SEQ ID NO: 76928 - DNA, 120 bp, Homo sapiens
  misc_feature: 601 for SV(C|O) and mtDNA
ctgcccgccatcatcctagtcctcatcgccctcccatccctgcgcatcctttacataacagacgaggtcaacgatccctcccttaccatcaaatcaattggccaccaatggtactgaacc

SEQ ID NO: 76929 - DNA, 120 bp, Homo sapiens
  misc_feature: 601 for SV(C|O) and mtDNA
aactcatacccccattatgtaaaatccattgtcgcatccacctttattatcagtctcttccccacaacaatattcatgtgcctagaccaagaagttattatctcgaactgacactgagcc

SEQ ID NO: 76930 - DNA, 120 bp, Homo sapiens
  misc_feature: 601 for SV(C|O) and mtDNA
attttccttatctgcttcctagtcctgtatgcccttttcctaacactcacaacaaaactaactaatactaacatctcagacgctcaggaaatagaaaccgtctgaactatcctgcccgcc

SEQ ID NO: 76931 - DNA, 120 bp, Homo sapiens
  misc_feature: 601 for SV(C|O) and mtDNA
gacaattataccctagccaaccccttaaacacccctccccacatcaagcccgaatgatatttcctattcgcctacacaattctccgatccgtccctaacaaactaggaggcgtccttgcc

SEQ ID NO: 76932 - DNA, 120 bp, Homo sapiens
  misc_feature: 601 for SV(C|O) and mtDNA
agtatcaggcggcggcttcgaagccaaagtgatgtttggatgtaaagtgaaatattagttggcggatgaagcagatagtgaggaaagttgagccaataatgacgtgaagtccgtggaagc

SEQ ID NO: 76933 - DNA, 120 bp, Homo sapiens; identical to SEQ ID NO: 62854
  misc_feature: 601 for SV(C|O) and mtDNA

SEQ ID NO: 76934 - DNA, 120 bp, Homo sapiens
  misc_feature: 601 for SV(C|O) and mtDNA
aacatcggcattatcctcctgcttgcaactatagcaacagccttcataggctatgtcctcccgtgaggccaaatatcattctgaggggccacagtaattacaaacttactatccgccatc

SEQ ID NO: 76935 - DNA, 120 bp, Homo sapiens
  misc_feature: 601 for SV(C|O) and mtDNA
atgaaacatcctatcatctgtaggctcattcatttctctaacagcagtaatattaataattttcatgatttgagaagccttcgcttcgaagcgaaaagtcctaatagtagaagaaccctc

SEQ ID NO: 76936 - DNA, 120 bp, Homo sapiens
  misc_feature: 601 for SV(C|O) and mtDNA
attatgcctttttgggttgaggtgatgatggaggtggagatttggtgctgtgaaattgttttaggtaatagcttttctagtcaggttaggtctaggaggagtaggggcaggttttggctc

SEQ ID NO: 76937 - DNA, 120 bp, Homo sapiens
  misc_feature: 601 for SV(C|O) and mtDNA
gactgtgagtgcgttcgtagtttgagtttgctaggcagaatagtaatgaggatgtaagtccgtgggcgattatgagaatgactgcgccggtgaagcttcagggggtttggatgagaatgg

SEQ ID NO: 76938 - DNA, 120 bp, Homo sapiens
  misc_feature: 601 for SV(C|O) and mtDNA
gacattaacactattctcaccagacctcctaggcgacccagacaattataccctagccaaccccttaaacacccctccccacatcaagcccgaatgatatttcctattcgcctacacaat

SEQ ID NO: 76939 - DNA, 120 bp, Homo sapiens; identical to SEQ ID NO: 57212
  misc_feature: 601 for SV(C|O) and mtDNA

SEQ ID NO: 76940 - DNA, 120 bp, Homo sapiens; identical to SEQ ID NO: 58006
  misc_feature: 601 for SV(C|O) and mtDNA

SEQ ID NO: 76941 - DNA, 120 bp, Homo sapiens
  misc_feature: 601 for SV(C|O) and mtDNA
ctattaggacttttcgcttcgaagcgaaggcttctcaaatcatgaaaattattaatattactgctgttagagaaatgaatgagcctacagatgataggatgtttcatgtggtgtatgcat

SEQ ID NO: 76942 - DNA, 120 bp, Homo sapiens
  misc_feature: 601 for SV(C|O) and mtDNA
ccctcgtagtaacagccattctcatccaaaccccctgaagcttcaccggcgcagtcattctcataatcgcccacggacttacatcctcattactattctgcctagcaaactcaaactacg

SEQ ID NO: 76943 - DNA, 120 bp, Homo sapiens
  misc_feature: 601 for SV(C|O) and mtDNA
cctcatcctagcaataatccccatcctccatatatccaaacaacaaagcataatatttcgcccactaagccaatcactttattgactcctagccgcagacctcctcattctaacctgaat

SEQ ID NO: 76944 - DNA, 120 bp, Homo sapiens
  misc_feature: 601 for SV(C|O) and mtDNA
atcctagggctcagagcactgcagcagatcatttcatattgcttccgtggagtgtggcgagtcagctaaatactttgacgccggtggggatagcgatgattatggtagcggaggtgaaat

SEQ ID NO: 76945 - DNA, 120 bp, Homo sapiens
  misc_feature: 601 for SV(C|O) and mtDNA
attcctagttttattgctatagccattatgattattaatgatgagtattgattggtagtattggttatggttcattgtccggagagtatattgttgaagaggatagctattagaaggatt

SEQ ID NO: 76946 - DNA, 120 bp, Homo sapiens
  misc_feature: 601 for SV(C|O) and mtDNA
acccccactgatgttcgccgaccgttgactattctctacaaaccacaaagacattggaacactatacctattattcggcgcatgagctggagtcctaggcacagctctaagcctccttat

SEQ ID NO: 76947 - DNA, 120 bp, Homo sapiens
  misc_feature: 600 for SV(C|O) and mtDNA
acaggggttaggcctctttttaccagctccgaggtgattttcatattgaattgcaaattcgaagaagcagcttcaaacctgccggggcttctcccgccttttttcccggcggcgggagaa

SEQ ID NO: 76948 - DNA, 120 bp, Homo sapiens; identical to SEQ ID NO: 58908
  misc_feature: 600 for SV(C|O) and mtDNA

SEQ ID NO: 76949 - DNA, 120 bp, Homo sapiens; identical to SEQ ID NO: 55882
  misc_feature: 600 for SV(C|O) and mtDNA

SEQ ID NO: 76950 - DNA, 120 bp, Homo sapiens
  misc_feature: 600 for SV(C|O) and mtDNA
tgcccgccatcatcctagtcctcatcgccctcccatccctgcgcatcctttacataacagacgaggtcaacgatccctcccttaccatcaaatcaattggccaccaatggtactgaacct

SEQ ID NO: 76951 - DNA, 120 bp, Homo sapiens
  misc_feature: 600 for SV(C|O) and mtDNA
ccataaccaatactaccaatcaatactcatcattaataatcataatggctatagcaataaaactaggaatagccccctttcacttctgggtcccagaggttacccaaggcacccctctga

SEQ ID NO: 76952 - DNA, 120 bp, Homo sapiens
  misc_feature: 600 for SV(C|O) and mtDNA
cctgcacgacaacacataatgacccaccaatcacatgcctatcatatagtaaaacccagcccatgacccctaacaggggccctctcagccctcctaatgacctccggcctagccatgtga

SEQ ID NO: 76953 - DNA, 120 bp, Homo sapiens
  misc_feature: 600 for SV(C|O) and mtDNA
ggtgagtggtaggaagttttttcataggaggtgtatgagttggtcgtagcggaatcgggggtatgctgttcgaattcataagaacagggaggttagaagtagggtcttggtgacaaaata

SEQ ID NO: 76954 - DNA, 120 bp, Homo sapiens; identical to SEQ ID NO: 56314
  misc_feature: 600 for SV(C|O) and mtDNA

SEQ ID NO: 76955 - DNA, 120 bp, Homo sapiens; identical to SEQ ID NO: 60268
  misc_feature: 600 for SV(C|O) and mtDNA

SEQ ID NO: 76956 - DNA, 120 bp, Homo sapiens; identical to SEQ ID NO: 61158
  misc_feature: 600 for SV(C|O) and mtDNA

SEQ ID NO: 76957 - DNA, 120 bp, Homo sapiens
  misc_feature: 600 for SV(C|O) and mtDNA
tactatccatcctcatcctagcaataatccccatcctccatatatccaaacaacaaagcataatatttcgcccactaagccaatcactttattgactcctagccgcagacctcctcattc

SEQ ID NO: 76958 - DNA, 120 bp, Homo sapiens
  misc_feature: 600 for SV(C|O) and mtDNA
tacaagaacaccaatgaccccaatacgcaaaattaaccccctaataaaattaattaaccactcattcatcgacctccccaccccatccaacatctccgcatgatgaaacttcggctcact

SEQ ID NO: 76959 - DNA, 120 bp, Homo sapiens
  misc_feature: 600 for SV(C|O) and mtDNA
gtggtgtgtggtggccttggtatgtgctttctcgtgttacatcgcgccatcattggtatatggttagtgtgttggttagtaggcctagtatgaggagcgttatggagtggaagtgaaatc

SEQ ID NO: 76960 - DNA, 120 bp, Homo sapiens; identical to SEQ ID NO: 61384
  misc_feature: 600 for SV(C|O) and mtDNA

SEQ ID NO: 76961 - DNA, 120 bp, Homo sapiens; identical to SEQ ID NO: 60518
  misc_feature: 600 for SV(C|O) and mtDNA

SEQ ID NO: 76962 - DNA, 120 bp, Homo sapiens
  misc_feature: 600 for SV(C|O) and mtDNA
ccactacaatcttcctaggaacaacatatgacgcactctcccctgaactctacacaacatattttgtcaccaagaccctacttctaacctccctgttcttatgaattcgaacagcatacc

SEQ ID NO: 76963 - DNA, 120 bp, Homo sapiens
  misc_feature: 600 for SV(C|O) and mtDNA
aatgaaccataaccaatactaccaatcaatactcatcattaataatcataatggctatagcaataaaactaggaatagccccctttcacttctgggtcccagaggttacccaaggcaccc

SEQ ID NO: 76964 - DNA, 120 bp, Homo sapiens
  misc_feature: 600 for SV(C|O) and mtDNA
gggggctattcctagttttattgctatagccattatgattattaatgatgagtattgattggtagtattggttatggttcattgtccggagagtatattgttgaagaggatagctattag

SEQ ID NO: 76965 - DNA, 120 bp, Homo sapiens; identical to SEQ ID NO: 57150
  misc_feature: 600 for SV(C|O) and mtDNA

SEQ ID NO: 76966 - DNA, 120 bp, Homo sapiens
  misc_feature: 600 for SV(C|O) and mtDNA
accaatactaccaatcaatactcatcattaataatcataatggctatagcaataaaactaggaatagccccctttcacttctgggtcccagaggttacccaaggcacccctctgacatcc

SEQ ID NO: 76967 - DNA, 120 bp, Homo sapiens
  misc_feature: 600 for SV(C|O) and mtDNA
ctattctcaccagacctcctaggcgacccagacaattataccctagccaaccccttaaacacccctccccacatcaagcccgaatgatatttcctattcgcctacacaattctccgatcc

SEQ ID NO: 76968 - DNA, 120 bp, Homo sapiens; identical to SEQ ID NO: 57280
  misc_feature: 600 for SV(C|O) and mtDNA

SEQ ID NO: 76969 - DNA, 120 bp, Homo sapiens
  misc_feature: 600 for SV(C|O) and mtDNA
aaactcatacccccattatgtaaaatccattgtcgcatccacctttattatcagtctcttccccacaacaatattcatgtgcctagaccaagaagttattatctcgaactgacactgagc

SEQ ID NO: 76970 - DNA, 120 bp, Homo sapiens
  misc_feature: 600 for SV(C|O) and mtDNA
aagattaaaaatgccctagcccacttcttaccacaaggcacacctacaccccttatccccatactagttattatcgaaaccatcagcctactcattcaaccaatagccctggccgtacgc

SEQ ID NO: 76971 - DNA, 120 bp, Homo sapiens
  misc_feature: 600 for SV(C|O) and mtDNA
gcgactgtgagtgcgttcgtagtttgagtttgctaggcagaatagtaatgaggatgtaagtccgtgggcgattatgagaatgactgcgccggtgaagcttcagggggtttggatgagaat

SEQ ID NO: 76972 - DNA, 120 bp, Homo sapiens
  misc_feature: 600 for SV(C|O) and mtDNA
ccaggcgacctgcgactccttgacgttgacaatcgagtagtactcccgattgaagcccccattcgtataataattacatcacaagacgtcttgcactcatgagctgtccccacattaggc

SEQ ID NO: 76973 - DNA, 120 bp, Homo sapiens; identical to SEQ ID NO: 60863
  misc_feature: 600 for SV(C|O) and mtDNA

SEQ ID NO: 76974 - DNA, 120 bp, Homo sapiens
  misc_feature: 600 for SV(C|O) and mtDNA
gcaaaaagccggttagcgggggcaggcctcctagggagaggagggtggatggaattaagggtgttagtcatgttagcttgtttcaggtgcgagatagtagtagggtcgtggtgctggagt

SEQ ID NO: 76975 - DNA, 120 bp, Homo sapiens
  misc_feature: 600 for SV(C|O) and mtDNA
actattctcaccagacctcctaggcgacccagacaattataccctagccaaccccttaaacacccctccccacatcaagcccgaatgatatttcctattcgcctacacaattctccgatc

SEQ ID NO: 76976 - DNA, 120 bp, Homo sapiens; identical to SEQ ID NO: 56991
  misc_feature: 600 for SV(C|O) and mtDNA

SEQ ID NO: 76977 - DNA, 120 bp, Homo sapiens
  misc_feature: 600 for SV(C|O) and mtDNA
acaagaacaccaatgaccccaatacgcaaaattaaccccctaataaaattaattaaccactcattcatcgacctccccaccccatccaacatctccgcatgatgaaacttcggctcactc

SEQ ID NO: 76978 - DNA, 120 bp, Homo sapiens; identical to SEQ ID NO: 59887
  misc_feature: 600 for SV(C|O) and mtDNA

SEQ ID NO: 76979 - DNA, 120 bp, Homo sapiens
  misc_feature: 600 for SV(C|O) and mtDNA
atcactctcctacttacaggactcaacatactagtcacagccctatactccctctacatatttaccacaacacaatggggctcactcacccaccacattaacaacataaaaccctcattc

SEQ ID NO: 76980 - DNA, 120 bp, Homo sapiens
  misc_feature: 600 for SV(C|O) and mtDNA
cgtctttacgtgggtacttgcgcttactttgtagccttcatcagggtttgctgaagatggcggtatataggctgagcaagaggtggtgaggttgatcggggtttatcgattacagaacag

SEQ ID NO: 76981 - DNA, 120 bp, Homo sapiens
  misc_feature: 600 for SV(C|O) and mtDNA
ctcgagtgatgtgggcgattgatgaaaaggcggttgaggcgtctggtgagtagtgcatggctaggaatagtcctgtggtgatttggaggatcaggcaggcgccaaggagtgagccgaagt

SEQ ID NO: 76982 - DNA, 120 bp, Homo sapiens
  misc_feature: 600 for SV(C|O) and mtDNA
cactgatgttcgccgaccgttgactattctctacaaaccacaaagacattggaacactatacctattattcggcgcatgagctggagtcctaggcacagctctaagcctccttattcgag

SEQ ID NO: 76983 - DNA, 120 bp, Homo sapiens
  misc_feature: 600 for SV(C|O) and mtDNA
atatgagattgtttgggctactgctcgcagtgcgccgatcagggcgtagtttgagtttgatgctcaccctgatcagaggattgagtaaacggctaggctagaggtggctagaataaatag

SEQ ID NO: 76984 - DNA, 120 bp, Homo sapiens
  misc_feature: 600 for SV(C|O) and mtDNA
cctagtcctgtatgcccttttcctaacactcacaacaaaactaactaatactaacatctcagacgctcaggaaatagaaaccgtctgaactatcctgcccgccatcatcctagtcctcat

SEQ ID NO: 76985 - DNA, 120 bp, Homo sapiens; identical to SEQ ID NO: 54240
  misc_feature: 600 for SV(C|O) and mtDNA

SEQ ID NO: 76986 - DNA, 120 bp, Homo sapiens
  misc_feature: 600 for SV(C|O) and mtDNA
aatctactccacctcaatcacactactccccatatctaacaacgtaaaaataaaatgacagtttgaacatacaaaacccaccccattcctccccacactcatcgcccttaccacgctact

SEQ ID NO: 76987 - DNA, 120 bp, Homo sapiens
  misc_feature: 600 for SV(C|O) and mtDNA
aggactcaacatactagtcacagccctatactccctctacatatttaccacaacacaatggggctcactcacccaccacattaacaacataaaaccctcattcacacgagaaaacaccct

SEQ ID NO: 76988 - DNA, 120 bp, Homo sapiens
  misc_feature: 599 for SV(C|O) and mtDNA
tttgggtcttagctattgtgtgttcagatatgttaaagccactttcgtagtctattttgtgtcagctggagttttttacaactcaggtgagttttagctttattggggagggggtgatct

SEQ ID NO: 76989 - DNA, 120 bp, Homo sapiens
  misc_feature: 599 for SV(C|O) and mtDNA
ttgtgtagtaagggtggaaggtgattttatcggaatgggaggtgattcctagggggttgtttgatcccgtttcgtgcaagaataggaggtggagtgctgctagggctgcaataatgaagg

SEQ ID NO: 76990 - DNA, 120 bp, Homo sapiens; identical to SEQ ID NO: 54217
  misc_feature: 599 for SV(C|O) and mtDNA

SEQ ID NO: 76991 - DNA, 120 bp, Homo sapiens
  misc_feature: 599 for SV(C|O) and mtDNA
tccccatggatgacccccctcagataggggtcccttgaccaccatcctccgtgaaatcaatatcccgcacaagagtgctactctcctcgctccgggcccataacacttgggggtagctaa

SEQ ID NO: 76992 - DNA, 120 bp, Homo sapiens; identical to SEQ ID NO: 56656
  misc_feature: 599 for SV(C|O) and mtDNA

SEQ ID NO: 76993 - DNA, 120 bp, Homo sapiens
  misc_feature: 599 for SV(C|O) and mtDNA
ttaccatgttacgacttgtctcctctatataaatgcgtaggggttttagttaaatgtcctttgaagtatacttgaggagggtgacgggcggtgtgtacgcgcttcagggccctgttcaac

SEQ ID NO: 76994 - DNA, 120 bp, Homo sapiens
  misc_feature: 599 for SV(C|O) and mtDNA
acgtctttacgtgggtacttgcgcttactttgtagccttcatcagggtttgctgaagatggcggtatataggctgagcaagaggtggtgaggttgatcggggtttatcgattacagaaca

SEQ ID NO: 76995 - DNA, 120 bp, Homo sapiens
  misc_feature: 599 for SV(C|O) and mtDNA
accccctctagagcccactgtaaagctaacttagcattaaccttttaagttaaagattaagagaaccaacacctctttacagtgaaatgccccaactaaatactaccgtatggcccacca

SEQ ID NO: 76996 - DNA, 120 bp, Homo sapiens; identical to SEQ ID NO: 61342
  misc_feature: 599 for SV(C|O) and mtDNA

SEQ ID NO: 76997 - DNA, 120 bp, Homo sapiens
  misc_feature: 599 for SV(C|O) and mtDNA
tgattgtgtagtaagggtggaaggtgattttatcggaatgggaggtgattcctagggggttgtttgatcccgtttcgtgcaagaataggaggtggagtgctgctagggctgcaataatga

SEQ ID NO: 76998 - DNA, 120 bp, Homo sapiens; identical to SEQ ID NO: 57540
  misc_feature: 599 for SV(C|O) and mtDNA

SEQ ID NO: 76999 - DNA, 120 bp, Homo sapiens
  misc_feature: 599 for SV(C|O) and mtDNA
tgaggtggcaagaaatgggctacattttctaccccagaaaactacgatagcccttatgaaacttaagggtcgaaggtggatttagcagtaaactgagagtagagtgcttagttgaacagg

SEQ ID NO: 77000 - DNA, 120 bp, Homo sapiens
  misc_feature: 599 for SV(C|O) and mtDNA
taattccccccatccttaccaccctcgttaaccctaacaaaaaaaactcatacccccattatgtaaaatccattgtcgcatccacctttattatcagtctcttccccacaacaatattca

SEQ ID NO: 77001 - DNA, 120 bp, Homo sapiens; identical to SEQ ID NO: 56734
  misc_feature: 599 for SV(C|O) and mtDNA

SEQ ID NO: 77002 - DNA, 120 bp, Homo sapiens
  misc_feature: 599 for SV(C|O) and mtDNA
tgaaccataaccaatactaccaatcaatactcatcattaataatcataatggctatagcaataaaactaggaatagccccctttcacttctgggtcccagaggttacccaaggcacccct

SEQ ID NO: 77003 - DNA, 120 bp, Homo sapiens
  misc_feature: 599 for SV(C|O) and mtDNA
ggggctattcctagttttattgctatagccattatgattattaatgatgagtattgattggtagtattggttatggttcattgtccggagagtatattgttgaagaggatagctattaga

SEQ ID NO: 77004 - DNA, 120 bp, Homo sapiens
  misc_feature: 599 for SV(C|O) and mtDNA
ccactgatgttcgccgaccgttgactattctctacaaaccacaaagacattggaacactatacctattattcggcgcatgagctggagtcctaggcacagctctaagcctccttattcga

SEQ ID NO: 77005 - DNA, 120 bp, Homo sapiens
  misc_feature: 599 for SV(C|O) and mtDNA
tcctagttttattgctatagccattatgattattaatgatgagtattgattggtagtattggttatggttcattgtccggagagtatattgttgaagaggatagctattagaaggattat

SEQ ID NO: 77006 - DNA, 120 bp, Homo sapiens
  misc_feature: 599 for SV(C|O) and mtDNA
tccctgttcttatgaattcgaacagcatacccccgattccgctacgaccaactcatacacctcctatgaaaaaacttcctaccactcaccctagcattacttatatgatatgtctccata

SEQ ID NO: 77007 - DNA, 120 bp, Homo sapiens
  misc_feature: 599 for SV(C|O) and mtDNA
tagtgtgcatggttgttacttttatttggagttgcaccaaaatttttggggcctaagaccaatggatagctgttatcctttaaaagttgagaaagccatgttgttagacatgggggcatg

SEQ ID NO: 77008 - DNA, 120 bp, Homo sapiens
  misc_feature: 599 for SV(C|O) and mtDNA
tagtacgtgtcgtgtagtacgatgtctagtgatgagtttgctaatacaatgccagtcaggccgcctacggtgaaaagaaagatgaatcctagggctcagagcactgcagcagatcatttc

SEQ ID NO: 77009 - DNA, 120 bp, Homo sapiens
  misc_feature: 599 for SV(C|O) and mtDNA
taggactcataatagttacaatcggcatcaaccaaccacacctagcattcctgcacatctgtacccacgccttcttcaaagccatactatttatgtgctccgggtccatcatccacaacc

SEQ ID NO: 77010 - DNA, 120 bp, Homo sapiens
  misc_feature: 599 for SV(C|O) and mtDNA
cttctctccttaatgacattaacactattctcaccagacctcctaggcgacccagacaattataccctagccaaccccttaaacacccctccccacatcaagcccgaatgatatttccta

SEQ ID NO: 77011 - DNA, 120 bp, Homo sapiens
  misc_feature: 599 for SV(C|O) and mtDNA
tagcagcactccacctcctattcttgcacgaaacgggatcaaacaaccccctaggaatcacctcccattccgataaaatcaccttccacccttactacacaatcaaagacgccctcggct

SEQ ID NO: 77012 - DNA, 120 bp, Homo sapiens
  misc_feature: 599 for SV(C|O) and mtDNA
gtctacgtctattcctactgtaaatatatggtgtgctcacacgataaaccctaggaagccaattgatatcatagctcagaccatacctatgtatccaaatggttctttttttccggagta

SEQ ID NO: 77013 - DNA, 120 bp, Homo sapiens
  misc_feature: 599 for SV(C|O) and mtDNA
tacgggataatcctatttattacctcagaagtttttttcttcgcaggatttttctgagccttttaccactccagcctagcccctaccccccaattaggagggcactggcccccaacaggc

SEQ ID NO: 77014 - DNA, 120 bp, Homo sapiens
  misc_feature: 599 for SV(C|O) and mtDNA
taaggagaagatggttaggtctacggaggctccagggtgggagtagttccctgctaagggagggtagactgttcaacctgttcctgctccggcctccactatagcagatgcgagcaggag

SEQ ID NO: 77015 - DNA, 120 bp, Homo sapiens
  misc_feature: 599 for SV(C|O) and mtDNA
gtttatattcttatcctaccaggcttcggaataatctcccatattgtaacttactactccggaaaaaaagaaccatttggatacataggtatggtctgagctatgatatcaattggcttc

SEQ ID NO: 77016 - DNA, 120 bp, Homo sapiens; identical to SEQ ID NO: 56464
  misc_feature: 599 for SV(C|O) and mtDNA

SEQ ID NO: 77017 - DNA, 120 bp, Homo sapiens
  misc_feature: 599 for SV(C|O) and mtDNA
aacgtctttacgtgggtacttgcgcttactttgtagccttcatcagggtttgctgaagatggcggtatataggctgagcaagaggtggtgaggttgatcggggtttatcgattacagaac

SEQ ID NO: 77018 - DNA, 120 bp, Homo sapiens; identical to SEQ ID NO: 62530
  misc_feature: 599 for SV(C|O) and mtDNA

SEQ ID NO: 77019 - DNA, 120 bp, Homo sapiens
  misc_feature: 599 for SV(C|O) and mtDNA
ccctgttcttatgaattcgaacagcatacccccgattccgctacgaccaactcatacacctcctatgaaaaaacttcctaccactcaccctagcattacttatatgatatgtctccatac

SEQ ID NO: 77020 - DNA, 120 bp, Homo sapiens
  misc_feature: 599 for SV(C|O) and mtDNA
gtaaaaaatcagtgcgagcttagcgctgtgatgagtgtgcctgcaaagatggtagagtagatgacgggttgggccaggggattaattagtacgggaagggtataaccaacattttcgggg

SEQ ID NO: 77021 - DNA, 120 bp, Homo sapiens
  misc_feature: 599 for SV(C|O) and mtDNA
ataggaggactactcaaaaccatacctctcacttcaacctccctcaccattggcagcctagcattagcaggaatacctttcctcacaggtttctactccaaagaccacatcatcgaaacc

SEQ ID NO: 77022 - DNA, 120 bp, Homo sapiens
  misc_feature: 599 for SV(C|O) and mtDNA
gggcagtgagagtgagtagtagaatgtttagtgagcctagggtgttgtgagtgtaaattagtgcgatgagtaggggaagggagcctactagggtgtagaataggaagtatgtgcctgcgt

SEQ ID NO: 77023 - DNA, 120 bp, Homo sapiens
  misc_feature: 599 for SV(C|O) and mtDNA
ccttaccccccactattaacctactgggagaactctctgtgctagtaaccacgttctcctgatcaaatatcactctcctacttacaggactcaacatactagtcacagccctatactccc

SEQ ID NO: 77024 - DNA, 120 bp, Homo sapiens
  misc_feature: 599 for SV(C|O) and mtDNA
ggcgacccagacaattataccctagccaaccccttaaacacccctccccacatcaagcccgaatgatatttcctattcgcctacacaattctccgatccgtccctaacaaactaggaggc

SEQ ID NO: 77025 - DNA, 120 bp, Homo sapiens; identical to SEQ ID NO: 61263
  misc_feature: 599 for SV(C|O) and mtDNA

SEQ ID NO: 77026 - DNA, 120 bp, Homo sapiens
  misc_feature: 599 for SV(C|O) and mtDNA
atacattgggacagacctagttcaatgaatctgaggaggctactcagtagacagtcccaccctcacacgattctttacctttcacttcatcttgcccttcattattgcagccctagcagc

SEQ ID NO: 77027 - DNA, 120 bp, Homo sapiens; identical to SEQ ID NO: 60864
  misc_feature: 599 for SV(C|O) and mtDNA

SEQ ID NO: 77028 - DNA, 120 bp, Homo sapiens; identical to SEQ ID NO: 59963
  misc_feature: 599 for SV(C|O) and mtDNA

SEQ ID NO: 77029 - DNA, 120 bp, Homo sapiens
  misc_feature: 599 for SV(C|O) and mtDNA
cctagcagaaaatagcccactaatccaaactctaacactatgcttaggcgctatcaccactctgttcgcagcagtctgcgcccttacacaaaatgacatcaaaaaaatcgtagccttctc

SEQ ID NO: 77030 - DNA, 120 bp, Homo sapiens
  misc_feature: 599 for SV(C|O) and mtDNA
attgtgtagtaagggtggaaggtgattttatcggaatgggaggtgattcctagggggttgtttgatcccgtttcgtgcaagaataggaggtggagtgctgctagggctgcaataatgaag

SEQ ID NO: 77031 - DNA, 120 bp, Homo sapiens
  misc_feature: 599 for SV(C|O) and mtDNA
caagcactatagttgtagcaggaatcttcttactcatccgcttccaccccctagcagaaaatagcccactaatccaaactctaacactatgcttaggcgctatcaccactctgttcgcag

SEQ ID NO: 77032 - DNA, 120 bp, Homo sapiens
  misc_feature: 599 for SV(C|O) and mtDNA
agtgagagtgagtagtagaatgtttagtgagcctagggtgttgtgagtgtaaattagtgcgatgagtaggggaagggagcctactagggtgtagaataggaagtatgtgcctgcgttcag

SEQ ID NO: 77033 - DNA, 120 bp, Homo sapiens; identical to SEQ ID NO: 59530
  misc_feature: 599 for SV(C|O) and mtDNA

SEQ ID NO: 77034 - DNA, 120 bp, Homo sapiens
  misc_feature: 599 for SV(C|O) and mtDNA
aaaactcatacccccattatgtaaaatccattgtcgcatccacctttattatcagtctcttccccacaacaatattcatgtgcctagaccaagaagttattatctcgaactgacactgag

SEQ ID NO: 77035 - DNA, 120 bp, Homo sapiens
  misc_feature: 599 for SV(C|O) and mtDNA
ctaatcaaactaacctcaaaacaaatgataaccatacacaacactaaaggacgaacctgatctcttatactagtatccttaatcatttttattgccacaactaacctcctcggactcctg

SEQ ID NO: 77036 - DNA, 120 bp, Homo sapiens
  misc_feature: 599 for SV(C|O) and mtDNA
ccccctctagagcccactgtaaagctaacttagcattaaccttttaagttaaagattaagagaaccaacacctctttacagtgaaatgccccaactaaatactaccgtatggcccaccat

SEQ ID NO: 77037 - DNA, 120 bp, Homo sapiens
  misc_feature: 599 for SV(C|O) and mtDNA
atcctcctgcttgcaactatagcaacagccttcataggctatgtcctcccgtgaggccaaatatcattctgaggggccacagtaattacaaacttactatccgccatcccatacattggg

SEQ ID NO: 77038 - DNA, 120 bp, Homo sapiens
  misc_feature: 599 for SV(C|O) and mtDNA
agtaggttaatagtggggggtaaggcgaggttagcgaggcttgctagaagtcatcaaaaagctattagtgggagtagagtttgaagtccttgagagaggattatgatgcgactgtgagtg

SEQ ID NO: 77039 - DNA, 120 bp, Homo sapiens
  misc_feature: 599 for SV(C|O) and mtDNA
atttgatggtaagggagggatcgttgacctcgtctgttatgtaaaggatgcgcagggatgggagggcgatgaggactaggatgatggcgggcaggatagttcagacggtttctatttcct

SEQ ID NO: 77040 - DNA, 120 bp, Homo sapiens
  misc_feature: 599 for SV(C|O) and mtDNA
aaacatcggcattatcctcctgcttgcaactatagcaacagccttcataggctatgtcctcccgtgaggccaaatatcattctgaggggccacagtaattacaaacttactatccgccat

SEQ ID NO: 77041 - DNA, 120 bp, Homo sapiens; identical to SEQ ID NO: 54938
  misc_feature: 599 for SV(C|O) and mtDNA

SEQ ID NO: 77042 - DNA, 120 bp, Homo sapiens
  misc_feature: 599 for SV(C|O) and mtDNA
agcagcactccacctcctattcttgcacgaaacgggatcaaacaaccccctaggaatcacctcccattccgataaaatcaccttccacccttactacacaatcaaagacgccctcggctt

SEQ ID NO: 77043 - DNA, 120 bp, Homo sapiens
  misc_feature: 599 for SV(C|O) and mtDNA
aatagctatcctcttcaacaatatactctccggacaatgaaccataaccaatactaccaatcaatactcatcattaataatcataatggctatagcaataaaactaggaatagccccctt

SEQ ID NO: 77044 - DNA, 120 bp, Homo sapiens
  misc_feature: 599 for SV(C|O) and mtDNA
aaccgctatgtaattcgtacattactgccagccaccatgaatattgtacggtaccataaatacttgaccacctgtagtacataaaaacccaatccacatcaaaaccccctccccatgctt

SEQ ID NO: 77045 - DNA, 120 bp, Homo sapiens; identical to SEQ ID NO: 57428
  misc_feature: 598 for SV(C|O) and mtDNA

SEQ ID NO: 77046 - DNA, 120 bp, Homo sapiens
  misc_feature: 598 for SV(C|O) and mtDNA
tttacgtgggtacttgcgcttactttgtagccttcatcagggtttgctgaagatggcggtatataggctgagcaagaggtggtgaggttgatcggggtttatcgattacagaacaggctc

SEQ ID NO: 77047 - DNA, 120 bp, Homo sapiens
  misc_feature: 598 for SV(C|O) and mtDNA
ttgattgtgtagtaagggtggaaggtgattttatcggaatgggaggtgattcctagggggttgtttgatcccgtttcgtgcaagaataggaggtggagtgctgctagggctgcaataatg

SEQ ID NO: 77048 - DNA, 120 bp, Homo sapiens
  misc_feature: 598 for SV(C|O) and mtDNA
gaatcctagggctcagagcactgcagcagatcatttcatattgcttccgtggagtgtggcgagtcagctaaatactttgacgccggtggggatagcgatgattatggtagcggaggtgaa

SEQ ID NO: 77049 - DNA, 120 bp, Homo sapiens
  misc_feature: 598 for SV(C|O) and mtDNA
ttatgcctttttgggttgaggtgatgatggaggtggagatttggtgctgtgaaattgttttaggtaatagcttttctagtcaggttaggtctaggaggagtaggggcaggttttggctcg

SEQ ID NO: 77050 - DNA, 120 bp, Homo sapiens; identical to SEQ ID NO: 55696
  misc_feature: 598 for SV(C|O) and mtDNA

SEQ ID NO: 77051 - DNA, 120 bp, Homo sapiens
  misc_feature: 598 for SV(C|O) and mtDNA
actcatacccccattatgtaaaatccattgtcgcatccacctttattatcagtctcttccccacaacaatattcatgtgcctagaccaagaagttattatctcgaactgacactgagcca

SEQ ID NO: 77052 - DNA, 120 bp, Homo sapiens
  misc_feature: 598 for SV(C|O) and mtDNA
actttccagtacacttaccatgttacgacttgtctcctctatataaatgcgtaggggttttagttaaatgtcctttgaagtatacttgaggagggtgacgggcggtgtgtacgcgcttca

SEQ ID NO: 77053 - DNA, 120 bp, Homo sapiens
  misc_feature: 598 for SV(C|O) and mtDNA
tctctccttaatgacattaacactattctcaccagacctcctaggcgacccagacaattataccctagccaaccccttaaacacccctccccacatcaagcccgaatgatatttcctatt

SEQ ID NO: 77054 - DNA, 120 bp, Homo sapiens
  misc_feature: 598 for SV(C|O) and mtDNA
tctccggacaatgaaccataaccaatactaccaatcaatactcatcattaataatcataatggctatagcaataaaactaggaatagccccctttcacttctgggtcccagaggttaccc

SEQ ID NO: 77055 - DNA, 120 bp, Homo sapiens
  misc_feature: 598 for SV(C|O) and mtDNA
tccagtacacttaccatgttacgacttgtctcctctatataaatgcgtaggggttttagttaaatgtcctttgaagtatacttgaggagggtgacgggcggtgtgtacgcgcttcagggc

SEQ ID NO: 77056 - DNA, 120 bp, Homo sapiens
  misc_feature: 598 for SV(C|O) and mtDNA
tcaccactacaatcttcctaggaacaacatatgacgcactctcccctgaactctacacaacatattttgtcaccaagaccctacttctaacctccctgttcttatgaattcgaacagcat

SEQ ID NO: 77057 - DNA, 120 bp, Homo sapiens
  misc_feature: 598 for SV(C|O) and mtDNA
tagccccctttcacttctgggtcccagaggttacccaaggcacccctctgacatccggcctgcttcttctcacatgacaaaaactagcccccatctcaatcatataccaaatctctccct

SEQ ID NO: 77058 - DNA, 120 bp, Homo sapiens; identical to SEQ ID NO: 61651
  misc_feature: 598 for SV(C|O) and mtDNA

SEQ ID NO: 77059 - DNA, 120 bp, Homo sapiens
  misc_feature: 598 for SV(C|O) and mtDNA
tacgtgggtacttgcgcttactttgtagccttcatcagggtttgctgaagatggcggtatataggctgagcaagaggtggtgaggttgatcggggtttatcgattacagaacaggctcct

SEQ ID NO: 77060 - DNA, 120 bp, Homo sapiens; identical to SEQ ID NO: 54976
  misc_feature: 598 for SV(C|O) and mtDNA

SEQ ID NO: 77061 - DNA, 120 bp, Homo sapiens; identical to SEQ ID NO: 57234
  misc_feature: 598 for SV(C|O) and mtDNA

SEQ ID NO: 77062 - DNA, 120 bp, Homo sapiens; identical to SEQ ID NO: 59458
  misc_feature: 598 for SV(C|O) and mtDNA

SEQ ID NO: 77063 - DNA, 120 bp, Homo sapiens
  misc_feature: 598 for SV(C|O) and mtDNA
taagcttctgactcttacctccctctctcctactcctgctcgcatctgctatagtggaggccggagcaggaacaggttgaacagtctaccctcccttagcagggaactactcccaccctg

SEQ ID NO: 77064 - DNA, 120 bp, Homo sapiens
  misc_feature: 598 for SV(C|O) and mtDNA
atatcccccgcccgcgtccctttctccataaaattcttcttagtagctattaccttcttattatttgatctagaaattgccctccttttacccctaccatgagccctacaaacaactaac

SEQ ID NO: 77065 - DNA, 120 bp, Homo sapiens
  misc_feature: 598 for SV(C|O) and mtDNA
caacatggctttctcaacttttaaaggataacagctatccattggtcttaggccccaaaaattttggtgcaactccaaataaaagtaacaaccatgcacactactataaccaccctaacc

SEQ ID NO: 77066 - DNA, 120 bp, Homo sapiens
  misc_feature: 598 for SV(C|O) and mtDNA
acccctcacccactaggataccaacaaacctactcacccttaacagcacatagtacataaagccatttaccgtacatagcacattacagtcaaatcccttctcgtccccatggatgaccc

SEQ ID NO: 77067 - DNA, 120 bp, Homo sapiens
  misc_feature: 598 for SV(C|O) and mtDNA
acaattataccctagccaaccccttaaacacccctccccacatcaagcccgaatgatatttcctattcgcctacacaattctccgatccgtccctaacaaactaggaggcgtccttgccc

SEQ ID NO: 77068 - DNA, 120 bp, Homo sapiens
  misc_feature: 598 for SV(C|O) and mtDNA
catcggcattatcctcctgcttgcaactatagcaacagccttcataggctatgtcctcccgtgaggccaaatatcattctgaggggccacagtaattacaaacttactatccgccatccc

SEQ ID NO: 77069 - DNA, 120 bp, Homo sapiens
  misc_feature: 598 for SV(C|O) and mtDNA
ggctattcctagttttattgctatagccattatgattattaatgatgagtattgattggtagtattggttatggttcattgtccggagagtatattgttgaagaggatagctattagaag

SEQ ID NO: 77070 - DNA, 120 bp, Homo sapiens
  misc_feature: 598 for SV(C|O) and mtDNA
ggactcataatagttacaatcggcatcaaccaaccacacctagcattcctgcacatctgtacccacgccttcttcaaagccatactatttatgtgctccgggtccatcatccacaacctt

SEQ ID NO: 77071 - DNA, 120 bp, Homo sapiens
  misc_feature: 598 for SV(C|O) and mtDNA
ctagcagcactccacctcctattcttgcacgaaacgggatcaaacaaccccctaggaatcacctcccattccgataaaatcaccttccacccttactacacaatcaaagacgccctcggc

SEQ ID NO: 77072 - DNA, 120 bp, Homo sapiens
  misc_feature: 598 for SV(C|O) and mtDNA
gaaaccgtctgaactatcctgcccgccatcatcctagtcctcatcgccctcccatccctgcgcatcctttacataacagacgaggtcaacgatccctcccttaccatcaaatcaattggc

SEQ ID NO: 77073 - DNA, 120 bp, Homo sapiens
  misc_feature: 598 for SV(C|O) and mtDNA
gaccgttgactattctctacaaaccacaaagacattggaacactatacctattattcggcgcatgagctggagtcctaggcacagctctaagcctccttattcgagccgagctgggccag

SEQ ID NO: 77074 - DNA, 120 bp, Homo sapiens
  misc_feature: 598 for SV(C|O) and mtDNA
ctactattaggacttttcgcttcgaagcgaaggcttctcaaatcatgaaaattattaatattactgctgttagagaaatgaatgagcctacagatgataggatgtttcatgtggtgtatg

SEQ ID NO: 77075 - DNA, 120 bp, Homo sapiens
  misc_feature: 598 for SV(C|O) and mtDNA
cgtgggtacttgcgcttactttgtagccttcatcagggtttgctgaagatggcggtatataggctgagcaagaggtggtgaggttgatcggggtttatcgattacagaacaggctcctct

SEQ ID NO: 77076 - DNA, 120 bp, Homo sapiens; identical to SEQ ID NO: 57060
  misc_feature: 598 for SV(C|O) and mtDNA

SEQ ID NO: 77077 - DNA, 120 bp, Homo sapiens; identical to SEQ ID NO: 57472
  misc_feature: 598 for SV(C|O) and mtDNA

SEQ ID NO: 77078 - DNA, 120 bp, Homo sapiens; identical to SEQ ID NO: 62861
  misc_feature: 598 for SV(C|O) and mtDNA

SEQ ID NO: 77079 - DNA, 120 bp, Homo sapiens
  misc_feature: 597 for SV(C|O) and mtDNA
aatcctagggctcagagcactgcagcagatcatttcatattgcttccgtggagtgtggcgagtcagctaaatactttgacgccggtggggatagcgatgattatggtagcggaggtgaaa

SEQ ID NO: 77080 - DNA, 120 bp, Homo sapiens; identical to SEQ ID NO: 56363
  misc_feature: 597 for SV(C|O) and mtDNA

SEQ ID NO: 77081 - DNA, 120 bp, Homo sapiens
  misc_feature: 597 for SV(C|O) and mtDNA
aaaatagcccactaatccaaactctaacactatgcttaggcgctatcaccactctgttcgcagcagtctgcgcccttacacaaaatgacatcaaaaaaatcgtagccttctccacttcaa

SEQ ID NO: 77082 - DNA, 120 bp, Homo sapiens
  misc_feature: 597 for SV(C|O) and mtDNA
ttcctagttttattgctatagccattatgattattaatgatgagtattgattggtagtattggttatggttcattgtccggagagtatattgttgaagaggatagctattagaaggatta

SEQ ID NO: 77083 - DNA, 120 bp, Homo sapiens; identical to SEQ ID NO: 57195
  misc_feature: 597 for SV(C|O) and mtDNA

SEQ ID NO: 77084 - DNA, 120 bp, Homo sapiens
  misc_feature: 597 for SV(C|O) and mtDNA
ttatggtgggccatacggtagtatttagttggggcatttcactgtaaagaggtgttggttctcttaatctttaacttaaaaggttaatgctaagttagctttacagtgggctctagaggg

SEQ ID NO: 77085 - DNA, 120 bp, Homo sapiens
  misc_feature: 597 for SV(C|O) and mtDNA
aaactctaacactatgcttaggcgctatcaccactctgttcgcagcagtctgcgcccttacacaaaatgacatcaaaaaaatcgtagccttctccacttcaagtcaactaggactcataa

SEQ ID NO: 77086 - DNA, 120 bp, Homo sapiens
  misc_feature: 597 for SV(C|O) and mtDNA
tagaaaagctattacctaaaacaatttcacagcaccaaatctccacctccatcatcacctcaacccaaaaaggcataattaaactttacttcctctctttcttcttcccactcatcctaa

SEQ ID NO: 77087 - DNA, 120 bp, Homo sapiens
  misc_feature: 597 for SV(C|O) and mtDNA
tgttcgccgaccgttgactattctctacaaaccacaaagacattggaacactatacctattattcggcgcatgagctggagtcctaggcacagctctaagcctccttattcgagccgagc

SEQ ID NO: 77088 - DNA, 120 bp, Homo sapiens
  misc_feature: 597 for SV(C|O) and mtDNA
cacaccacctgtccaaaaaggccttcgatacgggataatcctatttattacctcagaagtttttttcttcgcaggatttttctgagccttttaccactccagcctagcccctacccccca

SEQ ID NO: 77089 - DNA, 120 bp, Homo sapiens
  misc_feature: 597 for SV(C|O) and mtDNA
gaaacatcctatcatctgtaggctcattcatttctctaacagcagtaatattaataattttcatgatttgagaagccttcgcttcgaagcgaaaagtcctaatagtagaagaaccctcca

SEQ ID NO: 77090 - DNA, 120 bp, Homo sapiens
  misc_feature: 597 for SV(C|O) and mtDNA
ctcaccactacaatcttcctaggaacaacatatgacgcactctcccctgaactctacacaacatattttgtcaccaagaccctacttctaacctccctgttcttatgaattcgaacagca

SEQ ID NO: 77091 - DNA, 120 bp, Homo sapiens
  misc_feature: 597 for SV(C|O) and mtDNA
tcaagcactatagttgtagcaggaatcttcttactcatccgcttccaccccctagcagaaaatagcccactaatccaaactctaacactatgcttaggcgctatcaccactctgttcgca

SEQ ID NO: 77092 - DNA, 120 bp, Homo sapiens; identical to SEQ ID NO: 59316
  misc_feature: 597 for SV(C|O) and mtDNA

SEQ ID NO: 77093 - DNA, 120 bp, Homo sapiens
  misc_feature: 597 for SV(C|O) and mtDNA
tgaaacatcggcattatcctcctgcttgcaactatagcaacagccttcataggctatgtcctcccgtgaggccaaatatcattctgaggggccacagtaattacaaacttactatccgcc

SEQ ID NO: 77094 - DNA, 120 bp, Homo sapiens; identical to SEQ ID NO: 62967
  misc_feature: 597 for SV(C|O) and mtDNA

SEQ ID NO: 77095 - DNA, 120 bp, Homo sapiens; identical to SEQ ID NO: 57926
  misc_feature: 597 for SV(C|O) and mtDNA

SEQ ID NO: 77096 - DNA, 120 bp, Homo sapiens; identical to SEQ ID NO: 60262
  misc_feature: 597 for SV(C|O) and mtDNA

SEQ ID NO: 77097 - DNA, 120 bp, Homo sapiens
  misc_feature: 597 for SV(C|O) and mtDNA
tcctaatagtagaagaaccctccataaacctggagtgactatatggatgccccccaccctaccacacattcgaagaacccgtatacataaaatctagacaaaaaaggaaggaatcgaacc

SEQ ID NO: 77098 - DNA, 120 bp, Homo sapiens
  misc_feature: 597 for SV(C|O) and mtDNA
tcccatacattgggacagacctagttcaatgaatctgaggaggctactcagtagacagtcccaccctcacacgattctttacctttcacttcatcttgcccttcattattgcagccctag

SEQ ID NO: 77099 - DNA, 120 bp, Homo sapiens; identical to SEQ ID NO: 58454
  misc_feature: 597 for SV(C|O) and mtDNA

SEQ ID NO: 77100 - DNA, 120 bp, Homo sapiens
  misc_feature: 597 for SV(C|O) and mtDNA
aacatcctatcatctgtaggctcattcatttctctaacagcagtaatattaataattttcatgatttgagaagccttcgcttcgaagcgaaaagtcctaatagtagaagaaccctccata

SEQ ID NO: 77101 - DNA, 120 bp, Homo sapiens; identical to SEQ ID NO: 57301
  misc_feature: 597 for SV(C|O) and mtDNA

SEQ ID NO: 77102 - DNA, 120 bp, Homo sapiens
  misc_feature: 597 for SV(C|O) and mtDNA
taacaacatggctttctcaacttttaaaggataacagctatccattggtcttaggccccaaaaattttggtgcaactccaaataaaagtaacaaccatgcacactactataaccacccta

SEQ ID NO: 77103 - DNA, 120 bp, Homo sapiens; identical to SEQ ID NO: 62470
  misc_feature: 597 for SV(C|O) and mtDNA

SEQ ID NO: 77104 - DNA, 120 bp, Homo sapiens
  misc_feature: 597 for SV(C|O) and mtDNA
tagctatcctcttcaacaatatactctccggacaatgaaccataaccaatactaccaatcaatactcatcattaataatcataatggctatagcaataaaactaggaatagccccctttc

SEQ ID NO: 77105 - DNA, 120 bp, Homo sapiens; identical to SEQ ID NO: 60325
  misc_feature: 597 for SV(C|O) and mtDNA

SEQ ID NO: 77106 - DNA, 120 bp, Homo sapiens; identical to SEQ ID NO: 58456
  misc_feature: 597 for SV(C|O) and mtDNA

SEQ ID NO: 77107 - DNA, 120 bp, Homo sapiens; identical to SEQ ID NO: 55779
  misc_feature: 597 for SV(C|O) and mtDNA

SEQ ID NO: 77108 - DNA, 120 bp, Homo sapiens
  misc_feature: 597 for SV(C|O) and mtDNA
gtgtgtctacgtctattcctactgtaaatatatggtgtgctcacacgataaaccctaggaagccaattgatatcatagctcagaccatacctatgtatccaaatggttctttttttccgg

SEQ ID NO: 77109 - DNA, 120 bp, Homo sapiens
  misc_feature: 597 for SV(C|O) and mtDNA
gtgagtggtaggaagttttttcataggaggtgtatgagttggtcgtagcggaatcgggggtatgctgttcgaattcataagaacagggaggttagaagtagggtcttggtgacaaaatat

SEQ ID NO: 77110 - DNA, 120 bp, Homo sapiens; identical to SEQ ID NO: 59352
  misc_feature: 597 for SV(C|O) and mtDNA

SEQ ID NO: 77111 - DNA, 120 bp, Homo sapiens
  misc_feature: 597 for SV(C|O) and mtDNA
cctacactattaaagtttaccacaaccaccaccccatcatactctttcacccacagcaccaatcctacctccatcgctaaccccactaaaacactcaccaagacctcaacccctgacccc

SEQ ID NO: 77112 - DNA, 120 bp, Homo sapiens
  misc_feature: 597 for SV(C|O) and mtDNA
aatagtagaagaaccctccataaacctggagtgactatatggatgccccccaccctaccacacattcgaagaacccgtatacataaaatctagacaaaaaaggaaggaatcgaacccccc

SEQ ID NO: 77113 - DNA, 120 bp, Homo sapiens
  misc_feature: 597 for SV(C|O) and mtDNA
ggcgaggttagcgaggcttgctagaagtcatcaaaaagctattagtgggagtagagtttgaagtccttgagagaggattatgatgcgactgtgagtgcgttcgtagtttgagtttgctag

SEQ ID NO: 77114 - DNA, 120 bp, Homo sapiens; identical to SEQ ID NO: 61533
  misc_feature: 597 for SV(C|O) and mtDNA

SEQ ID NO: 77115 - DNA, 120 bp, Homo sapiens; identical to SEQ ID NO: 62973
  misc_feature: 597 for SV(C|O) and mtDNA

SEQ ID NO: 77116 - DNA, 120 bp, Homo sapiens; identical to SEQ ID NO: 60880
  misc_feature: 597 for SV(C|O) and mtDNA

SEQ ID NO: 77117 - DNA, 120 bp, Homo sapiens; identical to SEQ ID NO: 59438
  misc_feature: 597 for SV(C|O) and mtDNA

SEQ ID NO: 77118 - DNA, 120 bp, Homo sapiens
  misc_feature: 597 for SV(C|O) and mtDNA
actgtgagtgcgttcgtagtttgagtttgctaggcagaatagtaatgaggatgtaagtccgtgggcgattatgagaatgactgcgccggtgaagcttcagggggtttggatgagaatggc

SEQ ID NO: 77119 - DNA, 120 bp, Homo sapiens
  misc_feature: 597 for SV(C|O) and mtDNA
ctagtcctgtatgcccttttcctaacactcacaacaaaactaactaatactaacatctcagacgctcaggaaatagaaaccgtctgaactatcctgcccgccatcatcctagtcctcatc

SEQ ID NO: 77120 - DNA, 120 bp, Homo sapiens
  misc_feature: 597 for SV(C|O) and mtDNA
aggcaggcgccaaggagtgagccgaagtttcatcatgcggagatgttggatggggtggggaggtcgatgaatgagtggttaattaattttattagggggttaattttgcgtattggggtc

SEQ ID NO: 77121 - DNA, 120 bp, Homo sapiens
  misc_feature: 597 for SV(C|O) and mtDNA
ctctccttaatgacattaacactattctcaccagacctcctaggcgacccagacaattataccctagccaaccccttaaacacccctccccacatcaagcccgaatgatatttcctattc

SEQ ID NO: 77122 - DNA, 120 bp, Homo sapiens; identical to SEQ ID NO: 60606
  misc_feature: 597 for SV(C|O) and mtDNA

SEQ ID NO: 77123 - DNA, 120 bp, Homo sapiens
  misc_feature: 597 for SV(C|O) and mtDNA
atattcttatcctaccaggcttcggaataatctcccatattgtaacttactactccggaaaaaaagaaccatttggatacataggtatggtctgagctatgatatcaattggcttcctag

SEQ ID NO: 77124 - DNA, 120 bp, Homo sapiens
  misc_feature: 597 for SV(C|O) and mtDNA
attaggacttttcgcttcgaagcgaaggcttctcaaatcatgaaaattattaatattactgctgttagagaaatgaatgagcctacagatgataggatgtttcatgtggtgtatgcatcg

SEQ ID NO: 77125 - DNA, 120 bp, Homo sapiens
  misc_feature: 597 for SV(C|O) and mtDNA
ccctaattccccccatccttaccaccctcgttaaccctaacaaaaaaaactcatacccccattatgtaaaatccattgtcgcatccacctttattatcagtctcttccccacaacaatat

SEQ ID NO: 77126 - DNA, 120 bp, Homo sapiens
  misc_feature: 597 for SV(C|O) and mtDNA
catgaaacatcctatcatctgtaggctcattcatttctctaacagcagtaatattaataattttcatgatttgagaagccttcgcttcgaagcgaaaagtcctaatagtagaagaaccct

SEQ ID NO: 77127 - DNA, 120 bp, Homo sapiens
  misc_feature: 597 for SV(C|O) and mtDNA
actatgcttaggcgctatcaccactctgttcgcagcagtctgcgcccttacacaaaatgacatcaaaaaaatcgtagccttctccacttcaagtcaactaggactcataatagttacaat

SEQ ID NO: 77128 - DNA, 120 bp, Homo sapiens
  misc_feature: 597 for SV(C|O) and mtDNA
aaaaaaactcatacccccattatgtaaaatccattgtcgcatccacctttattatcagtctcttccccacaacaatattcatgtgcctagaccaagaagttattatctcgaactgacact

SEQ ID NO: 77129 - DNA, 120 bp, Homo sapiens; identical to SEQ ID NO: 62877
  misc_feature: 597 for SV(C|O) and mtDNA

SEQ ID NO: 77130 - DNA, 120 bp, Homo sapiens
  misc_feature: 597 for SV(C|O) and mtDNA
aaggagaagatggttaggtctacggaggctccagggtgggagtagttccctgctaagggagggtagactgttcaacctgttcctgctccggcctccactatagcagatgcgagcaggagt

SEQ ID NO: 77131 - DNA, 120 bp, Homo sapiens; identical to SEQ ID NO: 55958
  misc_feature: 596 for SV(C|O) and mtDNA

SEQ ID NO: 77132 - DNA, 120 bp, Homo sapiens
  misc_feature: 596 for SV(C|O) and mtDNA
tagtagaagaaccctccataaacctggagtgactatatggatgccccccaccctaccacacattcgaagaacccgtatacataaaatctagacaaaaaaggaaggaatcgaaccccccaa

SEQ ID NO: 77133 - DNA, 120 bp, Homo sapiens; identical to SEQ ID NO: 56934
  misc_feature: 596 for SV(C|O) and mtDNA

SEQ ID NO: 77134 - DNA, 120 bp, Homo sapiens
  misc_feature: 596 for SV(C|O) and mtDNA
ttcctacactattaaagtttaccacaaccaccaccccatcatactctttcacccacagcaccaatcctacctccatcgctaaccccactaaaacactcaccaagacctcaacccctgacc

SEQ ID NO: 77135 - DNA, 120 bp, Homo sapiens
  misc_feature: 596 for SV(C|O) and mtDNA
tgtttgcattaataaattaaagctccatagggtcttctcgtcttgctgtgtcatgcccgcctcttcacgggcaggtcaatttcactggttaaaagtaagagacagctgaaccctcgtgga

SEQ ID NO: 77136 - DNA, 120 bp, Homo sapiens
  misc_feature: 596 for SV(C|O) and mtDNA
tgtgcatggttgttacttttatttggagttgcaccaaaatttttggggcctaagaccaatggatagctgttatcctttaaaagttgagaaagccatgttgttagacatgggggcatgagt

SEQ ID NO: 77137 - DNA, 120 bp, Homo sapiens; identical to SEQ ID NO: 59012
  misc_feature: 596 for SV(C|O) and mtDNA

SEQ ID NO: 77138 - DNA, 120 bp, Homo sapiens
  misc_feature: 596 for SV(C|O) and mtDNA
atcggcattatcctcctgcttgcaactatagcaacagccttcataggctatgtcctcccgtgaggccaaatatcattctgaggggccacagtaattacaaacttactatccgccatccca

SEQ ID NO: 77139 - DNA, 120 bp, Homo sapiens; identical to SEQ ID NO: 56285
  misc_feature: 596 for SV(C|O) and mtDNA

SEQ ID NO: 77140 - DNA, 120 bp, Homo sapiens
  misc_feature: 596 for SV(C|O) and mtDNA
gctcacacctcatatcctccctactatgcctagaaggaataatactatcactgttcattatagctactctcataaccctcaacacccactccctcttagccaatattgtgcctattgcca

SEQ ID NO: 77141 - DNA, 120 bp, Homo sapiens
  misc_feature: 596 for SV(C|O) and mtDNA
acgggataatcctatttattacctcagaagtttttttcttcgcaggatttttctgagccttttaccactccagcctagcccctaccccccaattaggagggcactggcccccaacaggca

SEQ ID NO: 77142 - DNA, 120 bp, Homo sapiens; identical to SEQ ID NO: 55772
  misc_feature: 596 for SV(C|O) and mtDNA

SEQ ID NO: 77143 - DNA, 120 bp, Homo sapiens
  misc_feature: 596 for SV(C|O) and mtDNA
agctatcctcttcaacaatatactctccggacaatgaaccataaccaatactaccaatcaatactcatcattaataatcataatggctatagcaataaaactaggaatagccccctttca

SEQ ID NO: 77144 - DNA, 120 bp, Homo sapiens; identical to SEQ ID NO: 61833
  misc_feature: 596 for SV(C|O) and mtDNA

SEQ ID NO: 77145 - DNA, 120 bp, Homo sapiens
  misc_feature: 596 for SV(C|O) and mtDNA
gtgacttcatatgagattgtttgggctactgctcgcagtgcgccgatcagggcgtagtttgagtttgatgctcaccctgatcagaggattgagtaaacggctaggctagaggtggctaga

SEQ ID NO: 77146 - DNA, 120 bp, Homo sapiens; identical to SEQ ID NO: 59453
  misc_feature: 596 for SV(C|O) and mtDNA

SEQ ID NO: 77147 - DNA, 120 bp, Homo sapiens
  misc_feature: 596 for SV(C|O) and mtDNA
tctacgtctattcctactgtaaatatatggtgtgctcacacgataaaccctaggaagccaattgatatcatagctcagaccatacctatgtatccaaatggttctttttttccggagtag

SEQ ID NO: 77148 - DNA, 120 bp, Homo sapiens
  misc_feature: 596 for SV(C|O) and mtDNA
tcctcctgcttgcaactatagcaacagccttcataggctatgtcctcccgtgaggccaaatatcattctgaggggccacagtaattacaaacttactatccgccatcccatacattggga

SEQ ID NO: 77149 - DNA, 120 bp, Homo sapiens; identical to SEQ ID NO: 59847
  misc_feature: 596 for SV(C|O) and mtDNA

SEQ ID NO: 77150 - DNA, 120 bp, Homo sapiens
  misc_feature: 596 for SV(C|O) and mtDNA
acctttcatgatcacgccctcataatcattttccttatctgcttcctagtcctgtatgcccttttcctaacactcacaacaaaactaactaatactaacatctcagacgctcaggaaata

SEQ ID NO: 77151 - DNA, 120 bp, Homo sapiens
  misc_feature: 596 for SV(C|O) and mtDNA
acttcatatgagattgtttgggctactgctcgcagtgcgccgatcagggcgtagtttgagtttgatgctcaccctgatcagaggattgagtaaacggctaggctagaggtggctagaata

SEQ ID NO: 77152 - DNA, 120 bp, Homo sapiens
  misc_feature: 596 for SV(C|O) and mtDNA
ccctttcacttctgggtcccagaggttacccaaggcacccctctgacatccggcctgcttcttctcacatgacaaaaactagcccccatctcaatcatataccaaatctctccctcacta

SEQ ID NO: 77153 - DNA, 120 bp, Homo sapiens
  misc_feature: 596 for SV(C|O) and mtDNA
tactattaggacttttcgcttcgaagcgaaggcttctcaaatcatgaaaattattaatattactgctgttagagaaatgaatgagcctacagatgataggatgtttcatgtggtgtatgc

SEQ ID NO: 77154 - DNA, 120 bp, Homo sapiens
  misc_feature: 596 for SV(C|O) and mtDNA
taccccctctagagcccactgtaaagctaacttagcattaaccttttaagttaaagattaagagaaccaacacctctttacagtgaaatgccccaactaaatactaccgtatggcccacc

SEQ ID NO: 77155 - DNA, 120 bp, Homo sapiens
  misc_feature: 596 for SV(C|O) and mtDNA
tacacttaccatgttacgacttgtctcctctatataaatgcgtaggggttttagttaaatgtcctttgaagtatacttgaggagggtgacgggcggtgtgtacgcgcttcagggccctgt

SEQ ID NO: 77156 - DNA, 120 bp, Homo sapiens
  misc_feature: 596 for SV(C|O) and mtDNA
gtcatgttagcttgtttcaggtgcgagatagtagtagggtcgtggtgctggagtttaagttgagtagtaggaatgcggtagtagttaggataatataaatagttaaattaagaatggtta

SEQ ID NO: 77157 - DNA, 120 bp, Homo sapiens
  misc_feature: 596 for SV(C|O) and mtDNA
attttacataatgggggtatgagttttttttgttagggttaacgagggtggtaaggatggggggaattagggaagtcagggttagggtggttatagtagtgtgcatggttgttactttta

SEQ ID NO: 77158 - DNA, 120 bp, Homo sapiens; identical to SEQ ID NO: 57044
  misc_feature: 596 for SV(C|O) and mtDNA

SEQ ID NO: 77159 - DNA, 120 bp, Homo sapiens; identical to SEQ ID NO: 61781
  misc_feature: 596 for SV(C|O) and mtDNA

SEQ ID NO: 77160 - DNA, 120 bp, Homo sapiens
  misc_feature: 596 for SV(C|O) and mtDNA
gtggcacccaaatctgcttccccatgaaagaacagagaatagtttaaattagaatcttagctttgggtgctaatggtggagttaaagactttttctctgatttgtccttggaaaaaggtt

SEQ ID NO: 77161 - DNA, 120 bp, Homo sapiens; identical to SEQ ID NO: 59717
  misc_feature: 596 for SV(C|O) and mtDNA

SEQ ID NO: 77162 - DNA, 120 bp, Homo sapiens
  misc_feature: 596 for SV(C|O) and mtDNA
cagcactccacctcctattcttgcacgaaacgggatcaaacaaccccctaggaatcacctcccattccgataaaatcaccttccacccttactacacaatcaaagacgccctcggcttac

SEQ ID NO: 77163 - DNA, 120 bp, Homo sapiens; identical to SEQ ID NO: 61512
  misc_feature: 596 for SV(C|O) and mtDNA

SEQ ID NO: 77164 - DNA, 120 bp, Homo sapiens
  misc_feature: 596 for SV(C|O) and mtDNA
ctaatagtagaagaaccctccataaacctggagtgactatatggatgccccccaccctaccacacattcgaagaacccgtatacataaaatctagacaaaaaaggaaggaatcgaacccc

SEQ ID NO: 77165 - DNA, 120 bp, Homo sapiens; identical to SEQ ID NO: 60709
  misc_feature: 596 for SV(C|O) and mtDNA

SEQ ID NO: 77166 - DNA, 120 bp, Homo sapiens; identical to SEQ ID NO: 61686
  misc_feature: 596 for SV(C|O) and mtDNA

SEQ ID NO: 77167 - DNA, 120 bp, Homo sapiens
  misc_feature: 596 for SV(C|O) and mtDNA
acccagacaattataccctagccaaccccttaaacacccctccccacatcaagcccgaatgatatttcctattcgcctacacaattctccgatccgtccctaacaaactaggaggcgtcc

SEQ ID NO: 77168 - DNA, 120 bp, Homo sapiens; identical to SEQ ID NO: 57021
  misc_feature: 596 for SV(C|O) and mtDNA

SEQ ID NO: 77169 - DNA, 120 bp, Homo sapiens
  misc_feature: 596 for SV(C|O) and mtDNA
gagagttctcccagtaggttaatagtggggggtaaggcgaggttagcgaggcttgctagaagtcatcaaaaagctattagtgggagtagagtttgaagtccttgagagaggattatgatg

SEQ ID NO: 77170 - DNA, 120 bp, Homo sapiens; identical to SEQ ID NO: 58749
  misc_feature: 596 for SV(C|O) and mtDNA

SEQ ID NO: 77171 - DNA, 120 bp, Homo sapiens
  misc_feature: 596 for SV(C|O) and mtDNA
cccatggatgacccccctcagataggggtcccttgaccaccatcctccgtgaaatcaatatcccgcacaagagtgctactctcctcgctccgggcccataacacttgggggtagctaaag

SEQ ID NO: 77172 - DNA, 120 bp, Homo sapiens; identical to SEQ ID NO: 56500
  misc_feature: 596 for SV(C|O) and mtDNA

SEQ ID NO: 77173 - DNA, 120 bp, Homo sapiens
  misc_feature: 596 for SV(C|O) and mtDNA
cacgataaaccctaggaagccaattgatatcatagctcagaccatacctatgtatccaaatggttctttttttccggagtagtaagttacaatatgggagattattccgaagcctggtag

SEQ ID NO: 77174 - DNA, 120 bp, Homo sapiens; identical to SEQ ID NO: 62533
  misc_feature: 596 for SV(C|O) and mtDNA

SEQ ID NO: 77175 - DNA, 120 bp, Homo sapiens; identical to SEQ ID NO: 56881
  misc_feature: 596 for SV(C|O) and mtDNA

SEQ ID NO: 77176 - DNA, 120 bp, Homo sapiens
  misc_feature: 596 for SV(C|O) and mtDNA
cattgggacagacctagttcaatgaatctgaggaggctactcagtagacagtcccaccctcacacgattctttacctttcacttcatcttgcccttcattattgcagccctagcagcact

SEQ ID NO: 77177 - DNA, 120 bp, Homo sapiens
  misc_feature: 596 for SV(C|O) and mtDNA
attgggtttttatgtactacaggtggtcaagtatttatggtaccgtacaatattcatggtggctggcagtaatgtacgaattacatagcggttgttgatgggtgagtcaatacttgggtg

SEQ ID NO: 77178 - DNA, 120 bp, Homo sapiens
  misc_feature: 596 for SV(C|O) and mtDNA
aggcgccaaggagtgagccgaagtttcatcatgcggagatgttggatggggtggggaggtcgatgaatgagtggttaattaattttattagggggttaattttgcgtattggggtcattg

SEQ ID NO: 77179 - DNA, 120 bp, Homo sapiens
  misc_feature: 596 for SV(C|O) and mtDNA
aggctgttgctatagttgcaagcaggaggataatgccgatgtttcaggtttctgagtagagaaatgatccgtaatataggcctcgcccgatgtgtaggaagaggcagataaagaatattg

SEQ ID NO: 77180 - DNA, 120 bp, Homo sapiens
  misc_feature: 596 for SV(C|O) and mtDNA
attctcaccagacctcctaggcgacccagacaattataccctagccaaccccttaaacacccctccccacatcaagcccgaatgatatttcctattcgcctacacaattctccgatccgt

SEQ ID NO: 77181 - DNA, 120 bp, Homo sapiens; identical to SEQ ID NO: 53965
  misc_feature: 596 for SV(C|O) and mtDNA

SEQ ID NO: 77182 - DNA, 120 bp, Homo sapiens
  misc_feature: 596 for SV(C|O) and mtDNA
atgaatattgttgtggggaagagactgataataaaggtggatgcgacaatggattttacataatgggggtatgagttttttttgttagggttaacgagggtggtaaggatggggggaatt

SEQ ID NO: 77183 - DNA, 120 bp, Homo sapiens
  misc_feature: 596 for SV(C|O) and mtDNA
agagagttctcccagtaggttaatagtggggggtaaggcgaggttagcgaggcttgctagaagtcatcaaaaagctattagtgggagtagagtttgaagtccttgagagaggattatgat

SEQ ID NO: 77184 - DNA, 120 bp, Homo sapiens
  misc_feature: 596 for SV(C|O) and mtDNA
aaaaatcagtgcgagcttagcgctgtgatgagtgtgcctgcaaagatggtagagtagatgacgggttgggccaggggattaattagtacgggaagggtataaccaacattttcggggtat

SEQ ID NO: 77185 - DNA, 120 bp, Homo sapiens
  misc_feature: 596 for SV(C|O) and mtDNA
aaagagtatgatggggtggtggttgtggtaaactttaatagtgtaggaagctgaataatttatgaaggagaggggtcagggttgattcgggaggatcctattggtgcgggggctttgtat

SEQ ID NO: 77186 - DNA, 120 bp, Homo sapiens
  misc_feature: 596 for SV(C|O) and mtDNA
agctttttgatgacttctagcaagcctcgctaacctcgccttaccccccactattaacctactgggagaactctctgtgctagtaaccacgttctcctgatcaaatatcactctcctact

SEQ ID NO: 77187 - DNA, 120 bp, Homo sapiens
  misc_feature: 596 for SV(C|O) and mtDNA
aggcgacctgcgactccttgacgttgacaatcgagtagtactcccgattgaagcccccattcgtataataattacatcacaagacgtcttgcactcatgagctgtccccacattaggctt

SEQ ID NO: 77188 - DNA, 120 bp, Homo sapiens
  misc_feature: 596 for SV(C|O) and mtDNA
aacgcccctcttcgtctgatccgtcctaatcacagcagtcctacttctcctatctctcccagtcctagctgctggcatcactatactactaacagaccgcaacctcaacaccaccttctt

SEQ ID NO: 77189 - DNA, 120 bp, Homo sapiens; identical to SEQ ID NO: 54213
  misc_feature: 595 for SV(C|O) and mtDNA

SEQ ID NO: 77190 - DNA, 120 bp, Homo sapiens; identical to SEQ ID NO: 62711
  misc_feature: 595 for SV(C|O) and mtDNA

SEQ ID NO: 77191 - DNA, 120 bp, Homo sapiens; identical to SEQ ID NO: 55766
  misc_feature: 595 for SV(C|O) and mtDNA

SEQ ID NO: 77192 - DNA, 120 bp, Homo sapiens; identical to SEQ ID NO: 55926
  misc_feature: 595 for SV(C|O) and mtDNA

SEQ ID NO: 77193 - DNA, 120 bp, Homo sapiens
  misc_feature: 595 for SV(C|O) and mtDNA
cggaggacaaccagtaagctacccttttaccatcattggacaagtagcatccgtactatacttcacaacaatcctaatcctaataccaactatctccctaattgaaaacaaaatactcaa

SEQ ID NO: 77194 - DNA, 120 bp, Homo sapiens
  misc_feature: 595 for SV(C|O) and mtDNA
gtctcgagtgatgtgggcgattgatgaaaaggcggttgaggcgtctggtgagtagtgcatggctaggaatagtcctgtggtgatttggaggatcaggcaggcgccaaggagtgagccgaa

SEQ ID NO: 77195 - DNA, 120 bp, Homo sapiens; identical to SEQ ID NO: 55985
  misc_feature: 595 for SV(C|O) and mtDNA

SEQ ID NO: 77196 - DNA, 120 bp, Homo sapiens; identical to SEQ ID NO: 62570
  misc_feature: 595 for SV(C|O) and mtDNA

SEQ ID NO: 77197 - DNA, 120 bp, Homo sapiens; identical to SEQ ID NO: 60053
  misc_feature: 595 for SV(C|O) and mtDNA

SEQ ID NO: 77198 - DNA, 120 bp, Homo sapiens; identical to SEQ ID NO: 61524
  misc_feature: 595 for SV(C|O) and mtDNA

SEQ ID NO: 77199 - DNA, 120 bp, Homo sapiens
  misc_feature: 595 for SV(C|O) and mtDNA
tgagagtgagtagtagaatgtttagtgagcctagggtgttgtgagtgtaaattagtgcgatgagtaggggaagggagcctactagggtgtagaataggaagtatgtgcctgcgttcaggc

SEQ ID NO: 77200 - DNA, 120 bp, Homo sapiens
  misc_feature: 595 for SV(C|O) and mtDNA
tgaatcctagggctcagagcactgcagcagatcatttcatattgcttccgtggagtgtggcgagtcagctaaatactttgacgccggtggggatagcgatgattatggtagcggaggtga

SEQ ID NO: 77201 - DNA, 120 bp, Homo sapiens
  misc_feature: 595 for SV(C|O) and mtDNA
tctacatatttaccacaacacaatggggctcactcacccaccacattaacaacataaaaccctcattcacacgagaaaacaccctcatgttcatacacctatcccccattctcctcctat

SEQ ID NO: 77202 - DNA, 120 bp, Homo sapiens
  misc_feature: 595 for SV(C|O) and mtDNA
gcccctcttcgtctgatccgtcctaatcacagcagtcctacttctcctatctctcccagtcctagctgctggcatcactatactactaacagaccgcaacctcaacaccaccttcttcga

SEQ ID NO: 77203 - DNA, 120 bp, Homo sapiens
  misc_feature: 595 for SV(C|O) and mtDNA
tcccagtaggttaatagtggggggtaaggcgaggttagcgaggcttgctagaagtcatcaaaaagctattagtgggagtagagtttgaagtccttgagagaggattatgatgcgactgtg

SEQ ID NO: 77204 - DNA, 120 bp, Homo sapiens
  misc_feature: 595 for SV(C|O) and mtDNA
tattcttatcctaccaggcttcggaataatctcccatattgtaacttactactccggaaaaaaagaaccatttggatacataggtatggtctgagctatgatatcaattggcttcctagg

SEQ ID NO: 77205 - DNA, 120 bp, Homo sapiens; identical to SEQ ID NO: 54170
  misc_feature: 595 for SV(C|O) and mtDNA

SEQ ID NO: 77206 - DNA, 120 bp, Homo sapiens
  misc_feature: 595 for SV(C|O) and mtDNA
tatatggtgtgctcacacgataaaccctaggaagccaattgatatcatagctcagaccatacctatgtatccaaatggttctttttttccggagtagtaagttacaatatgggagattat

SEQ ID NO: 77207 - DNA, 120 bp, Homo sapiens
  misc_feature: 595 for SV(C|O) and mtDNA
ctatatcccccgcccgcgtccctttctccataaaattcttcttagtagctattaccttcttattatttgatctagaaattgccctccttttacccctaccatgagccctacaaacaacta

SEQ ID NO: 77208 - DNA, 120 bp, Homo sapiens; identical to SEQ ID NO: 59520
  misc_feature: 595 for SV(C|O) and mtDNA

SEQ ID NO: 77209 - DNA, 120 bp, Homo sapiens; identical to SEQ ID NO: 59261
  misc_feature: 595 for SV(C|O) and mtDNA

SEQ ID NO: 77210 - DNA, 120 bp, Homo sapiens
  misc_feature: 595 for SV(C|O) and mtDNA
tactcctgctcgcatctgctatagtggaggccggagcaggaacaggttgaacagtctaccctcccttagcagggaactactcccaccctggagcctccgtagacctaaccatcttctcct

SEQ ID NO: 77211 - DNA, 120 bp, Homo sapiens
  misc_feature: 595 for SV(C|O) and mtDNA
agggggctattcctagttttattgctatagccattatgattattaatgatgagtattgattggtagtattggttatggttcattgtccggagagtatattgttgaagaggatagctatta

SEQ ID NO: 77212 - DNA, 120 bp, Homo sapiens
  misc_feature: 595 for SV(C|O) and mtDNA
gcagcactccacctcctattcttgcacgaaacgggatcaaacaaccccctaggaatcacctcccattccgataaaatcaccttccacccttactacacaatcaaagacgccctcggctta

SEQ ID NO: 77213 - DNA, 120 bp, Homo sapiens
  misc_feature: 595 for SV(C|O) and mtDNA
taagattaaaaatgccctagcccacttcttaccacaaggcacacctacaccccttatccccatactagttattatcgaaaccatcagcctactcattcaaccaatagccctggccgtacg

SEQ ID NO: 77214 - DNA, 120 bp, Homo sapiens
  misc_feature: 595 for SV(C|O) and mtDNA
gtttgggtcttagctattgtgtgttcagatatgttaaagccactttcgtagtctattttgtgtcagctggagttttttacaactcaggtgagttttagctttattggggagggggtgatc

SEQ ID NO: 77215 - DNA, 120 bp, Homo sapiens
  misc_feature: 595 for SV(C|O) and mtDNA
gtatgggggtaattatggtgggccatacggtagtatttagttggggcatttcactgtaaagaggtgttggttctcttaatctttaacttaaaaggttaatgctaagttagctttacagtg

SEQ ID NO: 77216 - DNA, 120 bp, Homo sapiens
  misc_feature: 595 for SV(C|O) and mtDNA
accactacaatcttcctaggaacaacatatgacgcactctcccctgaactctacacaacatattttgtcaccaagaccctacttctaacctccctgttcttatgaattcgaacagcatac

SEQ ID NO: 77217 - DNA, 120 bp, Homo sapiens; identical to SEQ ID NO: 57610
  misc_feature: 595 for SV(C|O) and mtDNA

SEQ ID NO: 77218 - DNA, 120 bp, Homo sapiens
  misc_feature: 595 for SV(C|O) and mtDNA
gccatcccatacattgggacagacctagttcaatgaatctgaggaggctactcagtagacagtcccaccctcacacgattctttacctttcacttcatcttgcccttcattattgcagcc

SEQ ID NO: 77219 - DNA, 120 bp, Homo sapiens
  misc_feature: 595 for SV(C|O) and mtDNA
ggcaatgaatgaagcgaacagattttcgttcattttggttctcagggtttgttataattttttatttttatgggctttggtgagggaggtaggtggtagtttgtgtttaatatttttagt

SEQ ID NO: 77220 - DNA, 120 bp, Homo sapiens; identical to SEQ ID NO: 57729
  misc_feature: 595 for SV(C|O) and mtDNA

SEQ ID NO: 77221 - DNA, 120 bp, Homo sapiens
  misc_feature: 595 for SV(C|O) and mtDNA
actgatgttcgccgaccgttgactattctctacaaaccacaaagacattggaacactatacctattattcggcgcatgagctggagtcctaggcacagctctaagcctccttattcgagc

SEQ ID NO: 77222 - DNA, 120 bp, Homo sapiens; identical to SEQ ID NO: 57974
  misc_feature: 595 for SV(C|O) and mtDNA

SEQ ID NO: 77223 - DNA, 120 bp, Homo sapiens; identical to SEQ ID NO: 55726
  misc_feature: 595 for SV(C|O) and mtDNA

SEQ ID NO: 77224 - DNA, 120 bp, Homo sapiens
  misc_feature: 595 for SV(C|O) and mtDNA
gaggtggcaagaaatgggctacattttctaccccagaaaactacgatagcccttatgaaacttaagggtcgaaggtggatttagcagtaaactgagagtagagtgcttagttgaacaggg

SEQ ID NO: 77225 - DNA, 120 bp, Homo sapiens
  misc_feature: 595 for SV(C|O) and mtDNA
ctgcagtgctctgagccctaggattcatctttcttttcaccgtaggcggcctgactggcattgtattagcaaactcatcactagacatcgtactacacgacacgtactacgttgtagctc

SEQ ID NO: 77226 - DNA, 120 bp, Homo sapiens
  misc_feature: 595 for SV(C|O) and mtDNA
caccaatcacatgcctatcatatagtaaaacccagcccatgacccctaacaggggccctctcagccctcctaatgacctccggcctagccatgtgatttcacttccactccataacgctc

SEQ ID NO: 77227 - DNA, 120 bp, Homo sapiens
  misc_feature: 595 for SV(C|O) and mtDNA
ctaattccccccatccttaccaccctcgttaaccctaacaaaaaaaactcatacccccattatgtaaaatccattgtcgcatccacctttattatcagtctcttccccacaacaatattc

SEQ ID NO: 77228 - DNA, 120 bp, Homo sapiens; identical to SEQ ID NO: 62870
  misc_feature: 595 for SV(C|O) and mtDNA

SEQ ID NO: 77229 - DNA, 120 bp, Homo sapiens
  misc_feature: 595 for SV(C|O) and mtDNA
ctttacgtgggtacttgcgcttactttgtagccttcatcagggtttgctgaagatggcggtatataggctgagcaagaggtggtgaggttgatcggggtttatcgattacagaacaggct

SEQ ID NO: 77230 - DNA, 120 bp, Homo sapiens
  misc_feature: 595 for SV(C|O) and mtDNA
caggggttaggcctctttttaccagctccgaggtgattttcatattgaattgcaaattcgaagaagcagcttcaaacctgccggggcttctcccgccttttttcccggcggcgggagaag

SEQ ID NO: 77231 - DNA, 120 bp, Homo sapiens
  misc_feature: 595 for SV(C|O) and mtDNA
ctccctgttcttatgaattcgaacagcatacccccgattccgctacgaccaactcatacacctcctatgaaaaaacttcctaccactcaccctagcattacttatatgatatgtctccat

SEQ ID NO: 77232 - DNA, 120 bp, Homo sapiens; identical to SEQ ID NO: 59831
  misc_feature: 595 for SV(C|O) and mtDNA

SEQ ID NO: 77233 - DNA, 120 bp, Homo sapiens
  misc_feature: 595 for SV(C|O) and mtDNA
cgccgccgggaaaaaaggcgggagaagccccggcaggtttgaagctgcttcttcgaatttgcaattcaatatgaaaatcacctcggagctggtaaaaagaggcctaacccctgtctttag

SEQ ID NO: 77234 - DNA, 120 bp, Homo sapiens
  misc_feature: 595 for SV(C|O) and mtDNA
cgactgtgagtgcgttcgtagtttgagtttgctaggcagaatagtaatgaggatgtaagtccgtgggcgattatgagaatgactgcgccggtgaagcttcagggggtttggatgagaatg

SEQ ID NO: 77235 - DNA, 120 bp, Homo sapiens; identical to SEQ ID NO: 62377
  misc_feature: 595 for SV(C|O) and mtDNA

SEQ ID NO: 77236 - DNA, 120 bp, Homo sapiens; identical to SEQ ID NO: 60677
  misc_feature: 595 for SV(C|O) and mtDNA

SEQ ID NO: 77237 - DNA, 120 bp, Homo sapiens; identical to SEQ ID NO: 56030
  misc_feature: 595 for SV(C|O) and mtDNA

SEQ ID NO: 77238 - DNA, 120 bp, Homo sapiens
  misc_feature: 595 for SV(C|O) and mtDNA
ccaatcacatgcctatcatatagtaaaacccagcccatgacccctaacaggggccctctcagccctcctaatgacctccggcctagccatgtgatttcacttccactccataacgctcct

SEQ ID NO: 77239 - DNA, 120 bp, Homo sapiens
  misc_feature: 595 for SV(C|O) and mtDNA
caggcaggcgccaaggagtgagccgaagtttcatcatgcggagatgttggatggggtggggaggtcgatgaatgagtggttaattaattttattagggggttaattttgcgtattggggt

SEQ ID NO: 77240 - DNA, 120 bp, Homo sapiens; identical to SEQ ID NO: 61052
  misc_feature: 595 for SV(C|O) and mtDNA

SEQ ID NO: 77241 - DNA, 120 bp, Homo sapiens
  misc_feature: 595 for SV(C|O) and mtDNA
cactatagttgtagcaggaatcttcttactcatccgcttccaccccctagcagaaaatagcccactaatccaaactctaacactatgcttaggcgctatcaccactctgttcgcagcagt

SEQ ID NO: 77242 - DNA, 120 bp, Homo sapiens; identical to SEQ ID NO: 60813
  misc_feature: 595 for SV(C|O) and mtDNA

SEQ ID NO: 77243 - DNA, 120 bp, Homo sapiens
  misc_feature: 595 for SV(C|O) and mtDNA
atggatcacaggtctatcaccctattaaccactcacgggagctctccatgcatttggtattttcgtctggggggtgtgcacgcgatagcattgcgagacgctggagccggagcaccctat

SEQ ID NO: 77244 - DNA, 120 bp, Homo sapiens; identical to SEQ ID NO: 57092
  misc_feature: 595 for SV(C|O) and mtDNA

SEQ ID NO: 77245 - DNA, 120 bp, Homo sapiens
  misc_feature: 595 for SV(C|O) and mtDNA
agaacaccaatgaccccaatacgcaaaattaaccccctaataaaattaattaaccactcattcatcgacctccccaccccatccaacatctccgcatgatgaaacttcggctcactcctt

SEQ ID NO: 77246 - DNA, 120 bp, Homo sapiens
  misc_feature: 595 for SV(C|O) and mtDNA
aagatgaagtgaaaggtaaagaatcgtgtgagggtgggactgtctactgagtagcctcctcagattcattgaactaggtctgtcccaatgtatgggatggcggatagtaagtttgtaatt

SEQ ID NO: 77247 - DNA, 120 bp, Homo sapiens
  misc_feature: 595 for SV(C|O) and mtDNA
aactccaaataaaagtaacaaccatgcacactactataaccaccctaaccctgacttccctaattccccccatccttaccaccctcgttaaccctaacaaaaaaaactcatacccccatt

SEQ ID NO: 77248 - DNA, 120 bp, Homo sapiens; identical to SEQ ID NO: 57771
  misc_feature: 594 for SV(C|O) and mtDNA

SEQ ID NO: 77249 - DNA, 120 bp, Homo sapiens; identical to SEQ ID NO: 61664
  misc_feature: 594 for SV(C|O) and mtDNA

SEQ ID NO: 77250 - DNA, 120 bp, Homo sapiens
  misc_feature: 594 for SV(C|O) and mtDNA
tttatattcttatcctaccaggcttcggaataatctcccatattgtaacttactactccggaaaaaaagaaccatttggatacataggtatggtctgagctatgatatcaattggcttcc

SEQ ID NO: 77251 - DNA, 120 bp, Homo sapiens; identical to SEQ ID NO: 62535
  misc_feature: 594 for SV(C|O) and mtDNA

SEQ ID NO: 77252 - DNA, 120 bp, Homo sapiens
  misc_feature: 594 for SV(C|O) and mtDNA
ttcgccgaccgttgactattctctacaaaccacaaagacattggaacactatacctattattcggcgcatgagctggagtcctaggcacagctctaagcctccttattcgagccgagctg

SEQ ID NO: 77253 - DNA, 120 bp, Homo sapiens
  misc_feature: 594 for SV(C|O) and mtDNA
ttccagtacacttaccatgttacgacttgtctcctctatataaatgcgtaggggttttagttaaatgtcctttgaagtatacttgaggagggtgacgggcggtgtgtacgcgcttcaggg

SEQ ID NO: 77254 - DNA, 120 bp, Homo sapiens; identical to SEQ ID NO: 62324
  misc_feature: 594 for SV(C|O) and mtDNA

SEQ ID NO: 77255 - DNA, 120 bp, Homo sapiens
  misc_feature: 594 for SV(C|O) and mtDNA
ttacgtgggtacttgcgcttactttgtagccttcatcagggtttgctgaagatggcggtatataggctgagcaagaggtggtgaggttgatcggggtttatcgattacagaacaggctcc

SEQ ID NO: 77256 - DNA, 120 bp, Homo sapiens
  misc_feature: 594 for SV(C|O) and mtDNA
cctgagaatccaaaattctccgtgccacctatcacaccccatcctaaagtaaggtcagctaaataagctatcgggcccataccccgaaaatgttggttatacccttcccgtactaattaa

SEQ ID NO: 77257 - DNA, 120 bp, Homo sapiens
  misc_feature: 594 for SV(C|O) and mtDNA
tgttagggggtcggaggaaaaggttggggaacagctaaataggttgttgttgatttggttaaaaaatagtagagggatgatgctaataattaggctgtgggtggttgtgttgattcaaat

SEQ ID NO: 77258 - DNA, 120 bp, Homo sapiens
  misc_feature: 594 for SV(C|O) and mtDNA
tgtctacgtctattcctactgtaaatatatggtgtgctcacacgataaaccctaggaagccaattgatatcatagctcagaccatacctatgtatccaaatggttctttttttccggagt

SEQ ID NO: 77259 - DNA, 120 bp, Homo sapiens
  misc_feature: 594 for SV(C|O) and mtDNA
tctaccccctctagagcccactgtaaagctaacttagcattaaccttttaagttaaagattaagagaaccaacacctctttacagtgaaatgccccaactaaatactaccgtatggccca

SEQ ID NO: 77260 - DNA, 120 bp, Homo sapiens
  misc_feature: 594 for SV(C|O) and mtDNA
tggattagtgggctattttctgctagggggtggaagcggatgagtaagaagattcctgctacaactatagtgcttgagtggagtagggctgagactggggtggggccttctatggctgag

SEQ ID NO: 77261 - DNA, 120 bp, Homo sapiens
  misc_feature: 594 for SV(C|O) and mtDNA
tacattgggacagacctagttcaatgaatctgaggaggctactcagtagacagtcccaccctcacacgattctttacctttcacttcatcttgcccttcattattgcagccctagcagca

SEQ ID NO: 77262 - DNA, 120 bp, Homo sapiens
  misc_feature: 594 for SV(C|O) and mtDNA
cagtgagagtgagtagtagaatgtttagtgagcctagggtgttgtgagtgtaaattagtgcgatgagtaggggaagggagcctactagggtgtagaataggaagtatgtgcctgcgttca

SEQ ID NO: 77263 - DNA, 120 bp, Homo sapiens
  misc_feature: 594 for SV(C|O) and mtDNA
agtacgtgtcgtgtagtacgatgtctagtgatgagtttgctaatacaatgccagtcaggccgcctacggtgaaaagaaagatgaatcctagggctcagagcactgcagcagatcatttca

SEQ ID NO: 77264 - DNA, 120 bp, Homo sapiens; identical to SEQ ID NO: 57271
  misc_feature: 594 for SV(C|O) and mtDNA

SEQ ID NO: 77265 - DNA, 120 bp, Homo sapiens; identical to SEQ ID NO: 57103
  misc_feature: 594 for SV(C|O) and mtDNA

SEQ ID NO: 77266 - DNA, 120 bp, Homo sapiens
  misc_feature: 594 for SV(C|O) and mtDNA
tcatgttagcttgtttcaggtgcgagatagtagtagggtcgtggtgctggagtttaagttgagtagtaggaatgcggtagtagttaggataatataaatagttaaattaagaatggttat

SEQ ID NO: 77267 - DNA, 120 bp, Homo sapiens
  misc_feature: 594 for SV(C|O) and mtDNA
ggctgttgctatagttgcaagcaggaggataatgccgatgtttcaggtttctgagtagagaaatgatccgtaatataggcctcgcccgatgtgtaggaagaggcagataaagaatattga

SEQ ID NO: 77268 - DNA, 120 bp, Homo sapiens
  misc_feature: 594 for SV(C|O) and mtDNA
actctaacactatgcttaggcgctatcaccactctgttcgcagcagtctgcgcccttacacaaaatgacatcaaaaaaatcgtagccttctccacttcaagtcaactaggactcataata

SEQ ID NO: 77269 - DNA, 120 bp, Homo sapiens
  misc_feature: 594 for SV(C|O) and mtDNA
tagtagtgtgcatggttgttacttttatttggagttgcaccaaaatttttggggcctaagaccaatggatagctgttatcctttaaaagttgagaaagccatgttgttagacatgggggc

SEQ ID NO: 77270 - DNA, 120 bp, Homo sapiens; identical to SEQ ID NO: 59685
  misc_feature: 594 for SV(C|O) and mtDNA

SEQ ID NO: 77271 - DNA, 120 bp, Homo sapiens; identical to SEQ ID NO: 61506
  misc_feature: 594 for SV(C|O) and mtDNA

SEQ ID NO: 77272 - DNA, 120 bp, Homo sapiens; identical to SEQ ID NO: 62710
  misc_feature: 594 for SV(C|O) and mtDNA

SEQ ID NO: 77273 - DNA, 120 bp, Homo sapiens; identical to SEQ ID NO: 60385
  misc_feature: 594 for SV(C|O) and mtDNA

SEQ ID NO: 77274 - DNA, 120 bp, Homo sapiens
  misc_feature: 594 for SV(C|O) and mtDNA
ccgggaaaaaaggcgggagaagccccggcaggtttgaagctgcttcttcgaatttgcaattcaatatgaaaatcacctcggagctggtaaaaagaggcctaacccctgtctttagattta

SEQ ID NO: 77275 - DNA, 120 bp, Homo sapiens
  misc_feature: 594 for SV(C|O) and mtDNA
aatccccctctacctaaaactcacagccctcgctgtcactttcctaggacttctaacagccctagacctcaactacctaaccaacaaacttaaaataaaatccccactatgcacatttta

SEQ ID NO: 77276 - DNA, 120 bp, Homo sapiens
  misc_feature: 594 for SV(C|O) and mtDNA
gtcgggtgtgttattattctgaattttgggggaggttatatgggtttaatagtttttttaatttatttagggggaatgatggttgtctttggatatactacagcgatggctattgaggag

SEQ ID NO: 77277 - DNA, 120 bp, Homo sapiens
  misc_feature: 594 for SV(C|O) and mtDNA
gtaacagccattctcatccaaaccccctgaagcttcaccggcgcagtcattctcataatcgcccacggacttacatcctcattactattctgcctagcaaactcaaactacgaacgcact

SEQ ID NO: 77278 - DNA, 120 bp, Homo sapiens; identical to SEQ ID NO: 61085
  misc_feature: 594 for SV(C|O) and mtDNA

SEQ ID NO: 77279 - DNA, 120 bp, Homo sapiens
  misc_feature: 594 for SV(C|O) and mtDNA
ggcctagtatgaggagcgttatggagtggaagtgaaatcacatggctaggccggaggtcattaggagggctgagagggcccctgttaggggtcatgggctgggttttactatatgatagg

SEQ ID NO: 77280 - DNA, 120 bp, Homo sapiens
  misc_feature: 594 for SV(C|O) and mtDNA
acatcggcattatcctcctgcttgcaactatagcaacagccttcataggctatgtcctcccgtgaggccaaatatcattctgaggggccacagtaattacaaacttactatccgccatcc

SEQ ID NO: 77281 - DNA, 120 bp, Homo sapiens
  misc_feature: 594 for SV(C|O) and mtDNA
ctagcagaaaatagcccactaatccaaactctaacactatgcttaggcgctatcaccactctgttcgcagcagtctgcgcccttacacaaaatgacatcaaaaaaatcgtagccttctcc

SEQ ID NO: 77282 - DNA, 120 bp, Homo sapiens
  misc_feature: 594 for SV(C|O) and mtDNA
gcactatagttgtagcaggaatcttcttactcatccgcttccaccccctagcagaaaatagcccactaatccaaactctaacactatgcttaggcgctatcaccactctgttcgcagcag

SEQ ID NO: 77283 - DNA, 120 bp, Homo sapiens; identical to SEQ ID NO: 58865
  misc_feature: 594 for SV(C|O) and mtDNA

SEQ ID NO: 77284 - DNA, 120 bp, Homo sapiens; identical to SEQ ID NO: 62409
  misc_feature: 594 for SV(C|O) and mtDNA

SEQ ID NO: 77285 - DNA, 120 bp, Homo sapiens; identical to SEQ ID NO: 61456
  misc_feature: 594 for SV(C|O) and mtDNA

SEQ ID NO: 77286 - DNA, 120 bp, Homo sapiens
  misc_feature: 594 for SV(C|O) and mtDNA
gagtatgatggggtggtggttgtggtaaactttaatagtgtaggaagctgaataatttatgaaggagaggggtcagggttgattcgggaggatcctattggtgcgggggctttgtatgat

SEQ ID NO: 77287 - DNA, 120 bp, Homo sapiens
  misc_feature: 594 for SV(C|O) and mtDNA
agccccctttcacttctgggtcccagaggttacccaaggcacccctctgacatccggcctgcttcttctcacatgacaaaaactagcccccatctcaatcatataccaaatctctccctc

SEQ ID NO: 77288 - DNA, 120 bp, Homo sapiens
  misc_feature: 594 for SV(C|O) and mtDNA
ctttccagtacacttaccatgttacgacttgtctcctctatataaatgcgtaggggttttagttaaatgtcctttgaagtatacttgaggagggtgacgggcggtgtgtacgcgcttcag

SEQ ID NO: 77289 - DNA, 120 bp, Homo sapiens; identical to SEQ ID NO: 57704
  misc_feature: 594 for SV(C|O) and mtDNA

SEQ ID NO: 77290 - DNA, 120 bp, Homo sapiens; identical to SEQ ID NO: 61828
  misc_feature: 594 for SV(C|O) and mtDNA

SEQ ID NO: 77291 - DNA, 120 bp, Homo sapiens
  misc_feature: 594 for SV(C|O) and mtDNA
aggcctagtatgaggagcgttatggagtggaagtgaaatcacatggctaggccggaggtcattaggagggctgagagggcccctgttaggggtcatgggctgggttttactatatgatag

SEQ ID NO: 77292 - DNA, 120 bp, Homo sapiens; identical to SEQ ID NO: 61565
  misc_feature: 594 for SV(C|O) and mtDNA

SEQ ID NO: 77293 - DNA, 120 bp, Homo sapiens; identical to SEQ ID NO: 62046
  misc_feature: 594 for SV(C|O) and mtDNA

SEQ ID NO: 77294 - DNA, 120 bp, Homo sapiens
  misc_feature: 594 for SV(C|O) and mtDNA
aacactattctcaccagacctcctaggcgacccagacaattataccctagccaaccccttaaacacccctccccacatcaagcccgaatgatatttcctattcgcctacacaattctccg

SEQ ID NO: 77295 - DNA, 120 bp, Homo sapiens
  misc_feature: 594 for SV(C|O) and mtDNA
cggacaatgaaccataaccaatactaccaatcaatactcatcattaataatcataatggctatagcaataaaactaggaatagccccctttcacttctgggtcccagaggttacccaagg

SEQ ID NO: 77296 - DNA, 120 bp, Homo sapiens
  misc_feature: 594 for SV(C|O) and mtDNA
atagtagtgtgcatggttgttacttttatttggagttgcaccaaaatttttggggcctaagaccaatggatagctgttatcctttaaaagttgagaaagccatgttgttagacatggggg

SEQ ID NO: 77297 - DNA, 120 bp, Homo sapiens
  misc_feature: 594 for SV(C|O) and mtDNA
caggcgacctgcgactccttgacgttgacaatcgagtagtactcccgattgaagcccccattcgtataataattacatcacaagacgtcttgcactcatgagctgtccccacattaggct

SEQ ID NO: 77298 - DNA, 120 bp, Homo sapiens
  misc_feature: 594 for SV(C|O) and mtDNA
actcgccacactccacggaagcaatatgaaatgatctgctgcagtgctctgagccctaggattcatctttcttttcaccgtaggcggcctgactggcattgtattagcaaactcatcact

SEQ ID NO: 77299 - DNA, 120 bp, Homo sapiens
  misc_feature: 594 for SV(C|O) and mtDNA
agcactccacctcctattcttgcacgaaacgggatcaaacaaccccctaggaatcacctcccattccgataaaatcaccttccacccttactacacaatcaaagacgccctcggcttact

SEQ ID NO: 77300 - DNA, 120 bp, Homo sapiens; identical to SEQ ID NO: 58135
  misc_feature: 593 for SV(C|O) and mtDNA

SEQ ID NO: 77301 - DNA, 120 bp, Homo sapiens; identical to SEQ ID NO: 56067
  misc_feature: 593 for SV(C|O) and mtDNA

SEQ ID NO: 77302 - DNA, 120 bp, Homo sapiens; identical to SEQ ID NO: 57431
  misc_feature: 593 for SV(C|O) and mtDNA

SEQ ID NO: 77303 - DNA, 120 bp, Homo sapiens
  misc_feature: 593 for SV(C|O) and mtDNA
ttctagcaagcctcgctaacctcgccttaccccccactattaacctactgggagaactctctgtgctagtaaccacgttctcctgatcaaatatcactctcctacttacaggactcaaca

SEQ ID NO: 77304 - DNA, 120 bp, Homo sapiens
  misc_feature: 593 for SV(C|O) and mtDNA
ttatgatgcgactgtgagtgcgttcgtagtttgagtttgctaggcagaatagtaatgaggatgtaagtccgtgggcgattatgagaatgactgcgccggtgaagcttcagggggtttgga

SEQ ID NO: 77305 - DNA, 120 bp, Homo sapiens
  misc_feature: 593 for SV(C|O) and mtDNA
tgtgtctacgtctattcctactgtaaatatatggtgtgctcacacgataaaccctaggaagccaattgatatcatagctcagaccatacctatgtatccaaatggttctttttttccgga

SEQ ID NO: 77306 - DNA, 120 bp, Homo sapiens; identical to SEQ ID NO: 57685
  misc_feature: 593 for SV(C|O) and mtDNA

SEQ ID NO: 77307 - DNA, 120 bp, Homo sapiens
  misc_feature: 593 for SV(C|O) and mtDNA
atagtagaagaaccctccataaacctggagtgactatatggatgccccccaccctaccacacattcgaagaacccgtatacataaaatctagacaaaaaaggaaggaatcgaacccccca

SEQ ID NO: 77308 - DNA, 120 bp, Homo sapiens
  misc_feature: 593 for SV(C|O) and mtDNA
actacaagaacaccaatgaccccaatacgcaaaattaaccccctaataaaattaattaaccactcattcatcgacctccccaccccatccaacatctccgcatgatgaaacttcggctca

SEQ ID NO: 77309 - DNA, 120 bp, Homo sapiens
  misc_feature: 593 for SV(C|O) and mtDNA
acactattctcaccagacctcctaggcgacccagacaattataccctagccaaccccttaaacacccctccccacatcaagcccgaatgatatttcctattcgcctacacaattctccga

SEQ ID NO: 77310 - DNA, 120 bp, Homo sapiens
  misc_feature: 593 for SV(C|O) and mtDNA
cagagagttctcccagtaggttaatagtggggggtaaggcgaggttagcgaggcttgctagaagtcatcaaaaagctattagtgggagtagagtttgaagtccttgagagaggattatga

SEQ ID NO: 77311 - DNA, 120 bp, Homo sapiens; identical to SEQ ID NO: 61349
  misc_feature: 593 for SV(C|O) and mtDNA

SEQ ID NO: 77312 - DNA, 120 bp, Homo sapiens
  misc_feature: 593 for SV(C|O) and mtDNA
tattcctagttttattgctatagccattatgattattaatgatgagtattgattggtagtattggttatggttcattgtccggagagtatattgttgaagaggatagctattagaaggat

SEQ ID NO: 77313 - DNA, 120 bp, Homo sapiens
  misc_feature: 593 for SV(C|O) and mtDNA
tatggtgggccatacggtagtatttagttggggcatttcactgtaaagaggtgttggttctcttaatctttaacttaaaaggttaatgctaagttagctttacagtgggctctagagggg

SEQ ID NO: 77314 - DNA, 120 bp, Homo sapiens
  misc_feature: 593 for SV(C|O) and mtDNA
tagggctcagagcactgcagcagatcatttcatattgcttccgtggagtgtggcgagtcagctaaatactttgacgccggtggggatagcgatgattatggtagcggaggtgaaatatgc

SEQ ID NO: 77315 - DNA, 120 bp, Homo sapiens
  misc_feature: 593 for SV(C|O) and mtDNA
ggcgacctgcgactccttgacgttgacaatcgagtagtactcccgattgaagcccccattcgtataataattacatcacaagacgtcttgcactcatgagctgtccccacattaggctta

SEQ ID NO: 77316 - DNA, 120 bp, Homo sapiens; identical to SEQ ID NO: 56106
  misc_feature: 593 for SV(C|O) and mtDNA

SEQ ID NO: 77317 - DNA, 120 bp, Homo sapiens
  misc_feature: 593 for SV(C|O) and mtDNA
ggatgacccccctcagataggggtcccttgaccaccatcctccgtgaaatcaatatcccgcacaagagtgctactctcctcgctccgggcccataacacttgggggtagctaaagtgaac

SEQ ID NO: 77318 - DNA, 120 bp, Homo sapiens; identical to SEQ ID NO: 62277
  misc_feature: 593 for SV(C|O) and mtDNA

SEQ ID NO: 77319 - DNA, 120 bp, Homo sapiens
  misc_feature: 593 for SV(C|O) and mtDNA
acattgggacagacctagttcaatgaatctgaggaggctactcagtagacagtcccaccctcacacgattctttacctttcacttcatcttgcccttcattattgcagccctagcagcac

SEQ ID NO: 77320 - DNA, 120 bp, Homo sapiens
  misc_feature: 593 for SV(C|O) and mtDNA
gtgcatggttgttacttttatttggagttgcaccaaaatttttggggcctaagaccaatggatagctgttatcctttaaaagttgagaaagccatgttgttagacatgggggcatgagtt

SEQ ID NO: 77321 - DNA, 120 bp, Homo sapiens
  misc_feature: 593 for SV(C|O) and mtDNA
ctacaagaacaccaatgaccccaatacgcaaaattaaccccctaataaaattaattaaccactcattcatcgacctccccaccccatccaacatctccgcatgatgaaacttcggctcac

SEQ ID NO: 77322 - DNA, 120 bp, Homo sapiens
  misc_feature: 593 for SV(C|O) and mtDNA
gtgagagtgagtagtagaatgtttagtgagcctagggtgttgtgagtgtaaattagtgcgatgagtaggggaagggagcctactagggtgtagaataggaagtatgtgcctgcgttcagg

SEQ ID NO: 77323 - DNA, 120 bp, Homo sapiens
  misc_feature: 593 for SV(C|O) and mtDNA
cataaccaatactaccaatcaatactcatcattaataatcataatggctatagcaataaaactaggaatagccccctttcacttctgggtcccagaggttacccaaggcacccctctgac

SEQ ID NO: 77324 - DNA, 120 bp, Homo sapiens; identical to SEQ ID NO: 56020
  misc_feature: 593 for SV(C|O) and mtDNA

SEQ ID NO: 77325 - DNA, 120 bp, Homo sapiens
  misc_feature: 593 for SV(C|O) and mtDNA
acacaccacctgtccaaaaaggccttcgatacgggataatcctatttattacctcagaagtttttttcttcgcaggatttttctgagccttttaccactccagcctagcccctacccccc

SEQ ID NO: 77326 - DNA, 120 bp, Homo sapiens
  misc_feature: 593 for SV(C|O) and mtDNA
ggcagtgagagtgagtagtagaatgtttagtgagcctagggtgttgtgagtgtaaattagtgcgatgagtaggggaagggagcctactagggtgtagaataggaagtatgtgcctgcgtt

SEQ ID NO: 77327 - DNA, 120 bp, Homo sapiens
  misc_feature: 593 for SV(C|O) and mtDNA
cgctcacacctcatatcctccctactatgcctagaaggaataatactatcactgttcattatagctactctcataaccctcaacacccactccctcttagccaatattgtgcctattgcc

SEQ ID NO: 77328 - DNA, 120 bp, Homo sapiens; identical to SEQ ID NO: 60072
  misc_feature: 593 for SV(C|O) and mtDNA

SEQ ID NO: 77329 - DNA, 120 bp, Homo sapiens
  misc_feature: 593 for SV(C|O) and mtDNA
gccttaccccccactattaacctactgggagaactctctgtgctagtaaccacgttctcctgatcaaatatcactctcctacttacaggactcaacatactagtcacagccctatactcc

SEQ ID NO: 77330 - DNA, 120 bp, Homo sapiens
  misc_feature: 593 for SV(C|O) and mtDNA
accaatcacatgcctatcatatagtaaaacccagcccatgacccctaacaggggccctctcagccctcctaatgacctccggcctagccatgtgatttcacttccactccataacgctcc

SEQ ID NO: 77331 - DNA, 120 bp, Homo sapiens
  misc_feature: 593 for SV(C|O) and mtDNA
ggacaatgaaccataaccaatactaccaatcaatactcatcattaataatcataatggctatagcaataaaactaggaatagccccctttcacttctgggtcccagaggttacccaaggc

SEQ ID NO: 77332 - DNA, 120 bp, Homo sapiens
  misc_feature: 593 for SV(C|O) and mtDNA
cattttccttatctgcttcctagtcctgtatgcccttttcctaacactcacaacaaaactaactaatactaacatctcagacgctcaggaaatagaaaccgtctgaactatcctgcccgc

SEQ ID NO: 77333 - DNA, 120 bp, Homo sapiens; identical to SEQ ID NO: 61283
  misc_feature: 593 for SV(C|O) and mtDNA

SEQ ID NO: 77334 - DNA, 120 bp, Homo sapiens
  misc_feature: 593 for SV(C|O) and mtDNA
gatgatggaggtggagatttggtgctgtgaaattgttttaggtaatagcttttctagtcaggttaggtctaggaggagtaggggcaggttttggctcgtaagaaggcctagataggggat

SEQ ID NO: 77335 - DNA, 120 bp, Homo sapiens; identical to SEQ ID NO: 58065
  misc_feature: 593 for SV(C|O) and mtDNA

SEQ ID NO: 77336 - DNA, 120 bp, Homo sapiens; identical to SEQ ID NO: 55604
  misc_feature: 593 for SV(C|O) and mtDNA

SEQ ID NO: 77337 - DNA, 120 bp, Homo sapiens
  misc_feature: 593 for SV(C|O) and mtDNA
acgtgggtacttgcgcttactttgtagccttcatcagggtttgctgaagatggcggtatataggctgagcaagaggtggtgaggttgatcggggtttatcgattacagaacaggctcctc

SEQ ID NO: 77338 - DNA, 120 bp, Homo sapiens
  misc_feature: 593 for SV(C|O) and mtDNA
gagagaggattatgatgcgactgtgagtgcgttcgtagtttgagtttgctaggcagaatagtaatgaggatgtaagtccgtgggcgattatgagaatgactgcgccggtgaagcttcagg

SEQ ID NO: 77339 - DNA, 120 bp, Homo sapiens
  misc_feature: 593 for SV(C|O) and mtDNA
ctctaacactatgcttaggcgctatcaccactctgttcgcagcagtctgcgcccttacacaaaatgacatcaaaaaaatcgtagccttctccacttcaagtcaactaggactcataatag

SEQ ID NO: 77340 - DNA, 120 bp, Homo sapiens
  misc_feature: 593 for SV(C|O) and mtDNA
ccttgtactatccctatgaggcataattataacaagctccatctgcctacgacaaacagacctaaaatcgctcattgcatactcttcaatcagccacatagccctcgtagtaacagccat

SEQ ID NO: 77341 - DNA, 120 bp, Homo sapiens
  misc_feature: 593 for SV(C|O) and mtDNA
ccttctctccttaatgacattaacactattctcaccagacctcctaggcgacccagacaattataccctagccaaccccttaaacacccctccccacatcaagcccgaatgatatttcct

SEQ ID NO: 77342 - DNA, 120 bp, Homo sapiens
  misc_feature: 593 for SV(C|O) and mtDNA
cctaattccccccatccttaccaccctcgttaaccctaacaaaaaaaactcatacccccattatgtaaaatccattgtcgcatccacctttattatcagtctcttccccacaacaatatt

SEQ ID NO: 77343 - DNA, 120 bp, Homo sapiens
  misc_feature: 593 for SV(C|O) and mtDNA
ccaccaatcacatgcctatcatatagtaaaacccagcccatgacccctaacaggggccctctcagccctcctaatgacctccggcctagccatgtgatttcacttccactccataacgct

SEQ ID NO: 77344 - DNA, 120 bp, Homo sapiens
  misc_feature: 593 for SV(C|O) and mtDNA
catgttagcttgtttcaggtgcgagatagtagtagggtcgtggtgctggagtttaagttgagtagtaggaatgcggtagtagttaggataatataaatagttaaattaagaatggttatg

SEQ ID NO: 77345 - DNA, 120 bp, Homo sapiens
  misc_feature: 593 for SV(C|O) and mtDNA
aaaaaactcatacccccattatgtaaaatccattgtcgcatccacctttattatcagtctcttccccacaacaatattcatgtgcctagaccaagaagttattatctcgaactgacactg

SEQ ID NO: 77346 - DNA, 120 bp, Homo sapiens
  misc_feature: 593 for SV(C|O) and mtDNA
caagaccctacttctaacctccctgttcttatgaattcgaacagcatacccccgattccgctacgaccaactcatacacctcctatgaaaaaacttcctaccactcaccctagcattact

SEQ ID NO: 77347 - DNA, 120 bp, Homo sapiens
  misc_feature: 593 for SV(C|O) and mtDNA
atatggtgtgctcacacgataaaccctaggaagccaattgatatcatagctcagaccatacctatgtatccaaatggttctttttttccggagtagtaagttacaatatgggagattatt

SEQ ID NO: 77348 - DNA, 120 bp, Homo sapiens; identical to SEQ ID NO: 59250
  misc_feature: 593 for SV(C|O) and mtDNA

SEQ ID NO: 77349 - DNA, 120 bp, Homo sapiens
  misc_feature: 592 for SV(C|O) and mtDNA
tttgatggtaagggagggatcgttgacctcgtctgttatgtaaaggatgcgcagggatgggagggcgatgaggactaggatgatggcgggcaggatagttcagacggtttctatttcctg

SEQ ID NO: 77350 - DNA, 120 bp, Homo sapiens; identical to SEQ ID NO: 54854
  misc_feature: 592 for SV(C|O) and mtDNA

SEQ ID NO: 77351 - DNA, 120 bp, Homo sapiens
  misc_feature: 592 for SV(C|O) and mtDNA
tggatgacccccctcagataggggtcccttgaccaccatcctccgtgaaatcaatatcccgcacaagagtgctactctcctcgctccgggcccataacacttgggggtagctaaagtgaa

SEQ ID NO: 77352 - DNA, 120 bp, Homo sapiens
  misc_feature: 592 for SV(C|O) and mtDNA
cctttcacttctgggtcccagaggttacccaaggcacccctctgacatccggcctgcttcttctcacatgacaaaaactagcccccatctcaatcatataccaaatctctccctcactaa

SEQ ID NO: 77353 - DNA, 120 bp, Homo sapiens; identical to SEQ ID NO: 57801
  misc_feature: 592 for SV(C|O) and mtDNA

SEQ ID NO: 77354 - DNA, 120 bp, Homo sapiens; identical to SEQ ID NO: 58101
  misc_feature: 592 for SV(C|O) and mtDNA

SEQ ID NO: 77355 - DNA, 120 bp, Homo sapiens
  misc_feature: 592 for SV(C|O) and mtDNA
cgaccgttgactattctctacaaaccacaaagacattggaacactatacctattattcggcgcatgagctggagtcctaggcacagctctaagcctccttattcgagccgagctgggcca

SEQ ID NO: 77356 - DNA, 120 bp, Homo sapiens; identical to SEQ ID NO: 56071
  misc_feature: 592 for SV(C|O) and mtDNA

SEQ ID NO: 77357 - DNA, 120 bp, Homo sapiens
  misc_feature: 592 for SV(C|O) and mtDNA
tgatgatggaggtggagatttggtgctgtgaaattgttttaggtaatagcttttctagtcaggttaggtctaggaggagtaggggcaggttttggctcgtaagaaggcctagatagggga

SEQ ID NO: 77358 - DNA, 120 bp, Homo sapiens
  misc_feature: 592 for SV(C|O) and mtDNA
tctttacgtgggtacttgcgcttactttgtagccttcatcagggtttgctgaagatggcggtatataggctgagcaagaggtggtgaggttgatcggggtttatcgattacagaacaggc

SEQ ID NO: 77359 - DNA, 120 bp, Homo sapiens; identical to SEQ ID NO: 57565
  misc_feature: 592 for SV(C|O) and mtDNA

SEQ ID NO: 77360 - DNA, 120 bp, Homo sapiens
  misc_feature: 592 for SV(C|O) and mtDNA
tccttaatgacattaacactattctcaccagacctcctaggcgacccagacaattataccctagccaaccccttaaacacccctccccacatcaagcccgaatgatatttcctattcgcc

SEQ ID NO: 77361 - DNA, 120 bp, Homo sapiens
  misc_feature: 592 for SV(C|O) and mtDNA
tcctagggctcagagcactgcagcagatcatttcatattgcttccgtggagtgtggcgagtcagctaaatactttgacgccggtggggatagcgatgattatggtagcggaggtgaaata

SEQ ID NO: 77362 - DNA, 120 bp, Homo sapiens; identical to SEQ ID NO: 59455
  misc_feature: 592 for SV(C|O) and mtDNA

SEQ ID NO: 77363 - DNA, 120 bp, Homo sapiens; identical to SEQ ID NO: 62867
  misc_feature: 592 for SV(C|O) and mtDNA

SEQ ID NO: 77364 - DNA, 120 bp, Homo sapiens; identical to SEQ ID NO: 57993
  misc_feature: 592 for SV(C|O) and mtDNA

SEQ ID NO: 77365 - DNA, 120 bp, Homo sapiens
  misc_feature: 592 for SV(C|O) and mtDNA
agtgtgcatggttgttacttttatttggagttgcaccaaaatttttggggcctaagaccaatggatagctgttatcctttaaaagttgagaaagccatgttgttagacatgggggcatga

SEQ ID NO: 77366 - DNA, 120 bp, Homo sapiens
  misc_feature: 592 for SV(C|O) and mtDNA
tcactgttcattatagctactctcataaccctcaacacccactccctcttagccaatattgtgcctattgccatactagtctttgccgcctgcgaagcagcggtgggcctagccctacta

SEQ ID NO: 77367 - DNA, 120 bp, Homo sapiens
  misc_feature: 592 for SV(C|O) and mtDNA
gggctactgctcgcagtgcgccgatcagggcgtagtttgagtttgatgctcaccctgatcagaggattgagtaaacggctaggctagaggtggctagaataaataggaggcctaggttga

SEQ ID NO: 77368 - DNA, 120 bp, Homo sapiens
  misc_feature: 592 for SV(C|O) and mtDNA
tatgggggtaattatggtgggccatacggtagtatttagttggggcatttcactgtaaagaggtgttggttctcttaatctttaacttaaaaggttaatgctaagttagctttacagtgg

SEQ ID NO: 77369 - DNA, 120 bp, Homo sapiens
  misc_feature: 592 for SV(C|O) and mtDNA
caccactacaatcttcctaggaacaacatatgacgcactctcccctgaactctacacaacatattttgtcaccaagaccctacttctaacctccctgttcttatgaattcgaacagcata

SEQ ID NO: 77370 - DNA, 120 bp, Homo sapiens; identical to SEQ ID NO: 58019
  misc_feature: 592 for SV(C|O) and mtDNA

SEQ ID NO: 77371 - DNA, 120 bp, Homo sapiens; identical to SEQ ID NO: 60190
  misc_feature: 592 for SV(C|O) and mtDNA

SEQ ID NO: 77372 - DNA, 120 bp, Homo sapiens
  misc_feature: 592 for SV(C|O) and mtDNA
cttctagcaagcctcgctaacctcgccttaccccccactattaacctactgggagaactctctgtgctagtaaccacgttctcctgatcaaatatcactctcctacttacaggactcaac

SEQ ID NO: 77373 - DNA, 120 bp, Homo sapiens
  misc_feature: 592 for SV(C|O) and mtDNA
gttatagtagtgtgcatggttgttacttttatttggagttgcaccaaaatttttggggcctaagaccaatggatagctgttatcctttaaaagttgagaaagccatgttgttagacatgg

SEQ ID NO: 77374 - DNA, 120 bp, Homo sapiens
  misc_feature: 592 for SV(C|O) and mtDNA
gtgtgcatggttgttacttttatttggagttgcaccaaaatttttggggcctaagaccaatggatagctgttatcctttaaaagttgagaaagccatgttgttagacatgggggcatgag

SEQ ID NO: 77375 - DNA, 120 bp, Homo sapiens
  misc_feature: 592 for SV(C|O) and mtDNA
gtgtctacgtctattcctactgtaaatatatggtgtgctcacacgataaaccctaggaagccaattgatatcatagctcagaccatacctatgtatccaaatggttctttttttccggag

SEQ ID NO: 77376 - DNA, 120 bp, Homo sapiens
  misc_feature: 592 for SV(C|O) and mtDNA
gtgtagtaagggtggaaggtgattttatcggaatgggaggtgattcctagggggttgtttgatcccgtttcgtgcaagaataggaggtggagtgctgctagggctgcaataatgaagggc

SEQ ID NO: 77377 - DNA, 120 bp, Homo sapiens
  misc_feature: 592 for SV(C|O) and mtDNA
aaactacgaacgcactcacagtcgcatcataatcctctctcaaggacttcaaactctactcccactaatagctttttgatgacttctagcaagcctcgctaacctcgccttaccccccac

SEQ ID NO: 77378 - DNA, 120 bp, Homo sapiens
  misc_feature: 592 for SV(C|O) and mtDNA
gggacagacctagttcaatgaatctgaggaggctactcagtagacagtcccaccctcacacgattctttacctttcacttcatcttgcccttcattattgcagccctagcagcactccac

SEQ ID NO: 77379 - DNA, 120 bp, Homo sapiens
  misc_feature: 592 for SV(C|O) and mtDNA
acaatgaaccataaccaatactaccaatcaatactcatcattaataatcataatggctatagcaataaaactaggaatagccccctttcacttctgggtcccagaggttacccaaggcac

SEQ ID NO: 77380 - DNA, 120 bp, Homo sapiens
  misc_feature: 592 for SV(C|O) and mtDNA
gtctttacgtgggtacttgcgcttactttgtagccttcatcagggtttgctgaagatggcggtatataggctgagcaagaggtggtgaggttgatcggggtttatcgattacagaacagg

SEQ ID NO: 77381 - DNA, 120 bp, Homo sapiens
  misc_feature: 592 for SV(C|O) and mtDNA
ctaagattaaaaatgccctagcccacttcttaccacaaggcacacctacaccccttatccccatactagttattatcgaaaccatcagcctactcattcaaccaatagccctggccgtac

SEQ ID NO: 77382 - DNA, 120 bp, Homo sapiens
  misc_feature: 592 for SV(C|O) and mtDNA
acatgaaacatcctatcatctgtaggctcattcatttctctaacagcagtaatattaataattttcatgatttgagaagccttcgcttcgaagcgaaaagtcctaatagtagaagaaccc

SEQ ID NO: 77383 - DNA, 120 bp, Homo sapiens; identical to SEQ ID NO: 58215
  misc_feature: 592 for SV(C|O) and mtDNA

SEQ ID NO: 77384 - DNA, 120 bp, Homo sapiens
  misc_feature: 592 for SV(C|O) and mtDNA
cccaagtattgactcacccatcaacaaccgctatgtaattcgtacattactgccagccaccatgaatattgtacggtaccataaatacttgaccacctgtagtacataaaaacccaatcc

SEQ ID NO: 77385 - DNA, 120 bp, Homo sapiens; identical to SEQ ID NO: 61976
  misc_feature: 592 for SV(C|O) and mtDNA

SEQ ID NO: 77386 - DNA, 120 bp, Homo sapiens
  misc_feature: 592 for SV(C|O) and mtDNA
ctactcctgctcgcatctgctatagtggaggccggagcaggaacaggttgaacagtctaccctcccttagcagggaactactcccaccctggagcctccgtagacctaaccatcttctcc

SEQ ID NO: 77387 - DNA, 120 bp, Homo sapiens
  misc_feature: 592 for SV(C|O) and mtDNA
cccaccaatcacatgcctatcatatagtaaaacccagcccatgacccctaacaggggccctctcagccctcctaatgacctccggcctagccatgtgatttcacttccactccataacgc

SEQ ID NO: 77388 - DNA, 120 bp, Homo sapiens; identical to SEQ ID NO: 60276
  misc_feature: 592 for SV(C|O) and mtDNA

SEQ ID NO: 77389 - DNA, 120 bp, Homo sapiens
  misc_feature: 592 for SV(C|O) and mtDNA
gatcacgccctcataatcattttccttatctgcttcctagtcctgtatgcccttttcctaacactcacaacaaaactaactaatactaacatctcagacgctcaggaaatagaaaccgtc

SEQ ID NO: 77390 - DNA, 120 bp, Homo sapiens
  misc_feature: 592 for SV(C|O) and mtDNA
acagacctagttcaatgaatctgaggaggctactcagtagacagtcccaccctcacacgattctttacctttcacttcatcttgcccttcattattgcagccctagcagcactccacctc

SEQ ID NO: 77391 - DNA, 120 bp, Homo sapiens
  misc_feature: 592 for SV(C|O) and mtDNA
aactacaagaacaccaatgaccccaatacgcaaaattaaccccctaataaaattaattaaccactcattcatcgacctccccaccccatccaacatctccgcatgatgaaacttcggctc

SEQ ID NO: 77392 - DNA, 120 bp, Homo sapiens; identical to SEQ ID NO: 63153
  misc_feature: 592 for SV(C|O) and mtDNA

SEQ ID NO: 77393 - DNA, 120 bp, Homo sapiens; identical to SEQ ID NO: 62446
  misc_feature: 592 for SV(C|O) and mtDNA

SEQ ID NO: 77394 - DNA, 120 bp, Homo sapiens
  misc_feature: 592 for SV(C|O) and mtDNA
catacattgggacagacctagttcaatgaatctgaggaggctactcagtagacagtcccaccctcacacgattctttacctttcacttcatcttgcccttcattattgcagccctagcag

SEQ ID NO: 77395 - DNA, 120 bp, Homo sapiens; identical to SEQ ID NO: 59533
  misc_feature: 592 for SV(C|O) and mtDNA

SEQ ID NO: 77396 - DNA, 120 bp, Homo sapiens; identical to SEQ ID NO: 62857
  misc_feature: 592 for SV(C|O) and mtDNA

SEQ ID NO: 77397 - DNA, 120 bp, Homo sapiens
  misc_feature: 592 for SV(C|O) and mtDNA
cctctacatatttaccacaacacaatggggctcactcacccaccacattaacaacataaaaccctcattcacacgagaaaacaccctcatgttcatacacctatcccccattctcctcct

SEQ ID NO: 77398 - DNA, 120 bp, Homo sapiens
  misc_feature: 592 for SV(C|O) and mtDNA
catcctagcaataatccccatcctccatatatccaaacaacaaagcataatatttcgcccactaagccaatcactttattgactcctagccgcagacctcctcattctaacctgaatcgg

SEQ ID NO: 77399 - DNA, 120 bp, Homo sapiens
  misc_feature: 592 for SV(C|O) and mtDNA
ccctctacctaaaactcacagccctcgctgtcactttcctaggacttctaacagccctagacctcaactacctaaccaacaaacttaaaataaaatccccactatgcacattttatttct

SEQ ID NO: 77400 - DNA, 120 bp, Homo sapiens
  misc_feature: 592 for SV(C|O) and mtDNA
cccctttcacttctgggtcccagaggttacccaaggcacccctctgacatccggcctgcttcttctcacatgacaaaaactagcccccatctcaatcatataccaaatctctccctcact

SEQ ID NO: 77401 - DNA, 120 bp, Homo sapiens; identical to SEQ ID NO: 60584
  misc_feature: 592 for SV(C|O) and mtDNA

SEQ ID NO: 77402 - DNA, 120 bp, Homo sapiens
  misc_feature: 592 for SV(C|O) and mtDNA
ccaaacgcccctcttcgtctgatccgtcctaatcacagcagtcctacttctcctatctctcccagtcctagctgctggcatcactatactactaacagaccgcaacctcaacaccacctt

SEQ ID NO: 77403 - DNA, 120 bp, Homo sapiens
  misc_feature: 592 for SV(C|O) and mtDNA
actaccaatcaatactcatcattaataatcataatggctatagcaataaaactaggaatagccccctttcacttctgggtcccagaggttacccaaggcacccctctgacatccggcctg

SEQ ID NO: 77404 - DNA, 120 bp, Homo sapiens; identical to SEQ ID NO: 58902
  misc_feature: 592 for SV(C|O) and mtDNA

SEQ ID NO: 77405 - DNA, 120 bp, Homo sapiens
  misc_feature: 592 for SV(C|O) and mtDNA
acaaaatagactacgaaagtggctttaacatatctgaacacacaatagctaagacccaaactgggattagataccccactatgcttagccctaaacctcaacagttaaatcaacaaaact

SEQ ID NO: 77406 - DNA, 120 bp, Homo sapiens; identical to SEQ ID NO: 61268
  misc_feature: 592 for SV(C|O) and mtDNA

SEQ ID NO: 77407 - DNA, 120 bp, Homo sapiens
  misc_feature: 592 for SV(C|O) and mtDNA
aggactcataatagttacaatcggcatcaaccaaccacacctagcattcctgcacatctgtacccacgccttcttcaaagccatactatttatgtgctccgggtccatcatccacaacct

SEQ ID NO: 77408 - DNA, 120 bp, Homo sapiens
  misc_feature: 592 for SV(C|O) and mtDNA
aagaacaccaatgaccccaatacgcaaaattaaccccctaataaaattaattaaccactcattcatcgacctccccaccccatccaacatctccgcatgatgaaacttcggctcactcct

SEQ ID NO: 77409 - DNA, 120 bp, Homo sapiens
  misc_feature: 592 for SV(C|O) and mtDNA
agaggcagataaagaatattgaggcgccattggcgtgaaggtagcggatgattcagccataatttacgtctcgagtgatgtgggcgattgatgaaaaggcggttgaggcgtctggtgagt

SEQ ID NO: 77410 - DNA, 120 bp, Homo sapiens
  misc_feature: 592 for SV(C|O) and mtDNA
acacttaccatgttacgacttgtctcctctatataaatgcgtaggggttttagttaaatgtcctttgaagtatacttgaggagggtgacgggcggtgtgtacgcgcttcagggccctgtt

SEQ ID NO: 77411 - DNA, 120 bp, Homo sapiens
  misc_feature: 591 for SV(C|O) and mtDNA
ttcctaatgcttaccgaacgaaaaattctaggctatatacaactacgcaaaggccccaacgttgtaggcccctacgggctactacaacccttcgctgacgccataaaactcttcaccaaa

SEQ ID NO: 77412 - DNA, 120 bp, Homo sapiens
  misc_feature: 591 for SV(C|O) and mtDNA
tttagttggggcatttcactgtaaagaggtgttggttctcttaatctttaacttaaaaggttaatgctaagttagctttacagtgggctctagagggggtagagggggtgctatagggta

SEQ ID NO: 77413 - DNA, 120 bp, Homo sapiens
  misc_feature: 591 for SV(C|O) and mtDNA
ttgggacagacctagttcaatgaatctgaggaggctactcagtagacagtcccaccctcacacgattctttacctttcacttcatcttgcccttcattattgcagccctagcagcactcc

SEQ ID NO: 77414 - DNA, 120 bp, Homo sapiens
  misc_feature: 591 for SV(C|O) and mtDNA
acttctgggtcccagaggttacccaaggcacccctctgacatccggcctgcttcttctcacatgacaaaaactagcccccatctcaatcatataccaaatctctccctcactaaacgtaa

SEQ ID NO: 77415 - DNA, 120 bp, Homo sapiens; identical to SEQ ID NO: 62729
  misc_feature: 591 for SV(C|O) and mtDNA

SEQ ID NO: 77416 - DNA, 120 bp, Homo sapiens; identical to SEQ ID NO: 57132
  misc_feature: 591 for SV(C|O) and mtDNA

SEQ ID NO: 77417 - DNA, 120 bp, Homo sapiens; identical to SEQ ID NO: 61975
  misc_feature: 591 for SV(C|O) and mtDNA

SEQ ID NO: 77418 - DNA, 120 bp, Homo sapiens
  misc_feature: 591 for SV(C|O) and mtDNA
atcaccctccttaacctctacttctacctacgcctaatctactccacctcaatcacactactccccatatctaacaacgtaaaaataaaatgacagtttgaacatacaaaacccacccca

SEQ ID NO: 77419 - DNA, 120 bp, Homo sapiens
  misc_feature: 591 for SV(C|O) and mtDNA
tgatggtaagggagggatcgttgacctcgtctgttatgtaaaggatgcgcagggatgggagggcgatgaggactaggatgatggcgggcaggatagttcagacggtttctatttcctgag

SEQ ID NO: 77420 - DNA, 120 bp, Homo sapiens
  misc_feature: 591 for SV(C|O) and mtDNA
acttaccatgttacgacttgtctcctctatataaatgcgtaggggttttagttaaatgtcctttgaagtatacttgaggagggtgacgggcggtgtgtacgcgcttcagggccctgttca

SEQ ID NO: 77421 - DNA, 120 bp, Homo sapiens
  misc_feature: 591 for SV(C|O) and mtDNA
tcttctactattaggacttttcgcttcgaagcgaaggcttctcaaatcatgaaaattattaatattactgctgttagagaaatgaatgagcctacagatgataggatgtttcatgtggtg

SEQ ID NO: 77422 - DNA, 120 bp, Homo sapiens
  misc_feature: 591 for SV(C|O) and mtDNA
tctccttaatgacattaacactattctcaccagacctcctaggcgacccagacaattataccctagccaaccccttaaacacccctccccacatcaagcccgaatgatatttcctattcg

SEQ ID NO: 77423 - DNA, 120 bp, Homo sapiens; identical to SEQ ID NO: 58017
  misc_feature: 591 for SV(C|O) and mtDNA

SEQ ID NO: 77424 - DNA, 120 bp, Homo sapiens
  misc_feature: 591 for SV(C|O) and mtDNA
tccctaattccccccatccttaccaccctcgttaaccctaacaaaaaaaactcatacccccattatgtaaaatccattgtcgcatccacctttattatcagtctcttccccacaacaata

SEQ ID NO: 77425 - DNA, 120 bp, Homo sapiens
  misc_feature: 591 for SV(C|O) and mtDNA
cataatgggggtatgagttttttttgttagggttaacgagggtggtaaggatggggggaattagggaagtcagggttagggtggttatagtagtgtgcatggttgttacttttatttgga

SEQ ID NO: 77426 - DNA, 120 bp, Homo sapiens; identical to SEQ ID NO: 57380
  misc_feature: 591 for SV(C|O) and mtDNA

SEQ ID NO: 77427 - DNA, 120 bp, Homo sapiens; identical to SEQ ID NO: 60129
  misc_feature: 591 for SV(C|O) and mtDNA

SEQ ID NO: 77428 - DNA, 120 bp, Homo sapiens
  misc_feature: 591 for SV(C|O) and mtDNA
taacagccattctcatccaaaccccctgaagcttcaccggcgcagtcattctcataatcgcccacggacttacatcctcattactattctgcctagcaaactcaaactacgaacgcactc

SEQ ID NO: 77429 - DNA, 120 bp, Homo sapiens; identical to SEQ ID NO: 56227
  misc_feature: 591 for SV(C|O) and mtDNA

SEQ ID NO: 77430 - DNA, 120 bp, Homo sapiens
  misc_feature: 591 for SV(C|O) and mtDNA
ctaccccctctagagcccactgtaaagctaacttagcattaaccttttaagttaaagattaagagaaccaacacctctttacagtgaaatgccccaactaaatactaccgtatggcccac

SEQ ID NO: 77431 - DNA, 120 bp, Homo sapiens
  misc_feature: 591 for SV(C|O) and mtDNA
agtaacagccattctcatccaaaccccctgaagcttcaccggcgcagtcattctcataatcgcccacggacttacatcctcattactattctgcctagcaaactcaaactacgaacgcac

SEQ ID NO: 77432 - DNA, 120 bp, Homo sapiens
  misc_feature: 591 for SV(C|O) and mtDNA
gtaagctacccttttaccatcattggacaagtagcatccgtactatacttcacaacaatcctaatcctaataccaactatctccctaattgaaaacaaaatactcaaatgggcctgtcct

SEQ ID NO: 77433 - DNA, 120 bp, Homo sapiens
  misc_feature: 591 for SV(C|O) and mtDNA
cacgatggatcacaggtctatcaccctattaaccactcacgggagctctccatgcatttggtattttcgtctggggggtgtgcacgcgatagcattgcgagacgctggagccggagcacc

SEQ ID NO: 77434 - DNA, 120 bp, Homo sapiens
  misc_feature: 591 for SV(C|O) and mtDNA
ctacaatcttcctaggaacaacatatgacgcactctcccctgaactctacacaacatattttgtcaccaagaccctacttctaacctccctgttcttatgaattcgaacagcataccccc

SEQ ID NO: 77435 - DNA, 120 bp, Homo sapiens
  misc_feature: 591 for SV(C|O) and mtDNA
gggcaatgaatgaagcgaacagattttcgttcattttggttctcagggtttgttataattttttatttttatgggctttggtgagggaggtaggtggtagtttgtgtttaatatttttag

SEQ ID NO: 77436 - DNA, 120 bp, Homo sapiens
  misc_feature: 591 for SV(C|O) and mtDNA
atactaccaatcaatactcatcattaataatcataatggctatagcaataaaactaggaatagccccctttcacttctgggtcccagaggttacccaaggcacccctctgacatccggcc

SEQ ID NO: 77437 - DNA, 120 bp, Homo sapiens
  misc_feature: 591 for SV(C|O) and mtDNA
gatggtaagggagggatcgttgacctcgtctgttatgtaaaggatgcgcagggatgggagggcgatgaggactaggatgatggcgggcaggatagttcagacggtttctatttcctgagc

SEQ ID NO: 77438 - DNA, 120 bp, Homo sapiens; identical to SEQ ID NO: 62420
  misc_feature: 591 for SV(C|O) and mtDNA

SEQ ID NO: 77439 - DNA, 120 bp, Homo sapiens
  misc_feature: 591 for SV(C|O) and mtDNA
caatcacatgcctatcatatagtaaaacccagcccatgacccctaacaggggccctctcagccctcctaatgacctccggcctagccatgtgatttcacttccactccataacgctcctc

SEQ ID NO: 77440 - DNA, 120 bp, Homo sapiens
  misc_feature: 591 for SV(C|O) and mtDNA
ctgtgagtgcgttcgtagtttgagtttgctaggcagaatagtaatgaggatgtaagtccgtgggcgattatgagaatgactgcgccggtgaagcttcagggggtttggatgagaatggct

SEQ ID NO: 77441 - DNA, 120 bp, Homo sapiens
  misc_feature: 591 for SV(C|O) and mtDNA
ccaatactaccaatcaatactcatcattaataatcataatggctatagcaataaaactaggaatagccccctttcacttctgggtcccagaggttacccaaggcacccctctgacatccg

SEQ ID NO: 77442 - DNA, 120 bp, Homo sapiens
  misc_feature: 591 for SV(C|O) and mtDNA
cgatggatcacaggtctatcaccctattaaccactcacgggagctctccatgcatttggtattttcgtctggggggtgtgcacgcgatagcattgcgagacgctggagccggagcaccct

SEQ ID NO: 77443 - DNA, 120 bp, Homo sapiens
  misc_feature: 591 for SV(C|O) and mtDNA
acatcgcgccatcattggtatatggttagtgtgttggttagtaggcctagtatgaggagcgttatggagtggaagtgaaatcacatggctaggccggaggtcattaggagggctgagagg

SEQ ID NO: 77444 - DNA, 120 bp, Homo sapiens; identical to SEQ ID NO: 62864
  misc_feature: 591 for SV(C|O) and mtDNA

SEQ ID NO: 77445 - DNA, 120 bp, Homo sapiens
  misc_feature: 591 for SV(C|O) and mtDNA
acataatgggggtatgagttttttttgttagggttaacgagggtggtaaggatggggggaattagggaagtcagggttagggtggttatagtagtgtgcatggttgttacttttatttgg

SEQ ID NO: 77446 - DNA, 120 bp, Homo sapiens
  misc_feature: 591 for SV(C|O) and mtDNA
cataatcatacaaagcccccgcaccaataggatcctcccgaatcaaccctgacccctctccttcataaattattcagcttcctacactattaaagtttaccacaaccaccaccccatcat

SEQ ID NO: 77447 - DNA, 120 bp, Homo sapiens
  misc_feature: 591 for SV(C|O) and mtDNA
cactattctcaccagacctcctaggcgacccagacaattataccctagccaaccccttaaacacccctccccacatcaagcccgaatgatatttcctattcgcctacacaattctccgat

SEQ ID NO: 77448 - DNA, 120 bp, Homo sapiens
  misc_feature: 591 for SV(C|O) and mtDNA
atgggttcgattctcatagtcctagaaataagggggtttaagctcctattatttactctatcaaagtaactcttttatcagacatatttcttaggtttgagggggaatgctggagattgt

SEQ ID NO: 77449 - DNA, 120 bp, Homo sapiens
  misc_feature: 591 for SV(C|O) and mtDNA
aggtggagatttggtgctgtgaaattgttttaggtaatagcttttctagtcaggttaggtctaggaggagtaggggcaggttttggctcgtaagaaggcctagataggggattgtgcggt

SEQ ID NO: 77450 - DNA, 120 bp, Homo sapiens
  misc_feature: 591 for SV(C|O) and mtDNA
aggggttaggcctctttttaccagctccgaggtgattttcatattgaattgcaaattcgaagaagcagcttcaaacctgccggggcttctcccgccttttttcccggcggcgggagaagt

SEQ ID NO: 77451 - DNA, 120 bp, Homo sapiens
  misc_feature: 591 for SV(C|O) and mtDNA
aaacgcccctcttcgtctgatccgtcctaatcacagcagtcctacttctcctatctctcccagtcctagctgctggcatcactatactactaacagaccgcaacctcaacaccaccttct

SEQ ID NO: 77452 - DNA, 120 bp, Homo sapiens
  misc_feature: 591 for SV(C|O) and mtDNA
aagaccctacttctaacctccctgttcttatgaattcgaacagcatacccccgattccgctacgaccaactcatacacctcctatgaaaaaacttcctaccactcaccctagcattactt

SEQ ID NO: 77453 - DNA, 120 bp, Homo sapiens
  misc_feature: 590 for SV(C|O) and mtDNA
ttcatatgagattgtttgggctactgctcgcagtgcgccgatcagggcgtagtttgagtttgatgctcaccctgatcagaggattgagtaaacggctaggctagaggtggctagaataaa

SEQ ID NO: 77454 - DNA, 120 bp, Homo sapiens
  misc_feature: 590 for SV(C|O) and mtDNA
catcctatcatctgtaggctcattcatttctctaacagcagtaatattaataattttcatgatttgagaagccttcgcttcgaagcgaaaagtcctaatagtagaagaaccctccataaa

SEQ ID NO: 77455 - DNA, 120 bp, Homo sapiens; identical to SEQ ID NO: 62556
  misc_feature: 590 for SV(C|O) and mtDNA

SEQ ID NO: 77456 - DNA, 120 bp, Homo sapiens
  misc_feature: 590 for SV(C|O) and mtDNA
cttcatatgagattgtttgggctactgctcgcagtgcgccgatcagggcgtagtttgagtttgatgctcaccctgatcagaggattgagtaaacggctaggctagaggtggctagaataa

SEQ ID NO: 77457 - DNA, 120 bp, Homo sapiens
  misc_feature: 590 for SV(C|O) and mtDNA
tatatcccccgcccgcgtccctttctccataaaattcttcttagtagctattaccttcttattatttgatctagaaattgccctccttttacccctaccatgagccctacaaacaactaa

SEQ ID NO: 77458 - DNA, 120 bp, Homo sapiens; identical to SEQ ID NO: 56788
  misc_feature: 590 for SV(C|O) and mtDNA

SEQ ID NO: 77459 - DNA, 120 bp, Homo sapiens; identical to SEQ ID NO: 57480
  misc_feature: 590 for SV(C|O) and mtDNA

SEQ ID NO: 77460 - DNA, 120 bp, Homo sapiens; identical to SEQ ID NO: 60508
  misc_feature: 590 for SV(C|O) and mtDNA

SEQ ID NO: 77461 - DNA, 120 bp, Homo sapiens; identical to SEQ ID NO: 61697
  misc_feature: 590 for SV(C|O) and mtDNA

SEQ ID NO: 77462 - DNA, 120 bp, Homo sapiens
  misc_feature: 590 for SV(C|O) and mtDNA
tgatgttcgccgaccgttgactattctctacaaaccacaaagacattggaacactatacctattattcggcgcatgagctggagtcctaggcacagctctaagcctccttattcgagccg

SEQ ID NO: 77463 - DNA, 120 bp, Homo sapiens
  misc_feature: 590 for SV(C|O) and mtDNA
tcggcattatcctcctgcttgcaactatagcaacagccttcataggctatgtcctcccgtgaggccaaatatcattctgaggggccacagtaattacaaacttactatccgccatcccat

SEQ ID NO: 77464 - DNA, 120 bp, Homo sapiens
  misc_feature: 590 for SV(C|O) and mtDNA
agttctcccagtaggttaatagtggggggtaaggcgaggttagcgaggcttgctagaagtcatcaaaaagctattagtgggagtagagtttgaagtccttgagagaggattatgatgcga

SEQ ID NO: 77465 - DNA, 120 bp, Homo sapiens
  misc_feature: 590 for SV(C|O) and mtDNA
tcattttccttatctgcttcctagtcctgtatgcccttttcctaacactcacaacaaaactaactaatactaacatctcagacgctcaggaaatagaaaccgtctgaactatcctgcccg

SEQ ID NO: 77466 - DNA, 120 bp, Homo sapiens; identical to SEQ ID NO: 61256
  misc_feature: 590 for SV(C|O) and mtDNA

SEQ ID NO: 77467 - DNA, 120 bp, Homo sapiens; identical to SEQ ID NO: 58916
  misc_feature: 590 for SV(C|O) and mtDNA

SEQ ID NO: 77468 - DNA, 120 bp, Homo sapiens; identical to SEQ ID NO: 61060
  misc_feature: 590 for SV(C|O) and mtDNA

SEQ ID NO: 77469 - DNA, 120 bp, Homo sapiens; identical to SEQ ID NO: 62707
  misc_feature: 590 for SV(C|O) and mtDNA

SEQ ID NO: 77470 - DNA, 120 bp, Homo sapiens; identical to SEQ ID NO: 56907
  misc_feature: 590 for SV(C|O) and mtDNA

SEQ ID NO: 77471 - DNA, 120 bp, Homo sapiens
  misc_feature: 590 for SV(C|O) and mtDNA
gaaagagtatgatggggtggtggttgtggtaaactttaatagtgtaggaagctgaataatttatgaaggagaggggtcagggttgattcgggaggatcctattggtgcgggggctttgta

SEQ ID NO: 77472 - DNA, 120 bp, Homo sapiens
  misc_feature: 590 for SV(C|O) and mtDNA
actccaaataaaagtaacaaccatgcacactactataaccaccctaaccctgacttccctaattccccccatccttaccaccctcgttaaccctaacaaaaaaaactcatacccccatta

SEQ ID NO: 77473 - DNA, 120 bp, Homo sapiens
  misc_feature: 590 for SV(C|O) and mtDNA
gtgggctattttctgctagggggtggaagcggatgagtaagaagattcctgctacaactatagtgcttgagtggagtagggctgagactggggtggggccttctatggctgaggggagtc

SEQ ID NO: 77474 - DNA, 120 bp, Homo sapiens
  misc_feature: 590 for SV(C|O) and mtDNA
gtatttagttggggcatttcactgtaaagaggtgttggttctcttaatctttaacttaaaaggttaatgctaagttagctttacagtgggctctagagggggtagagggggtgctatagg

SEQ ID NO: 77475 - DNA, 120 bp, Homo sapiens; identical to SEQ ID NO: 59691
  misc_feature: 590 for SV(C|O) and mtDNA

SEQ ID NO: 77476 - DNA, 120 bp, Homo sapiens
  misc_feature: 590 for SV(C|O) and mtDNA
gtacgtgtcgtgtagtacgatgtctagtgatgagtttgctaatacaatgccagtcaggccgcctacggtgaaaagaaagatgaatcctagggctcagagcactgcagcagatcatttcat

SEQ ID NO: 77477 - DNA, 120 bp, Homo sapiens; identical to SEQ ID NO: 57452
  misc_feature: 590 for SV(C|O) and mtDNA

SEQ ID NO: 77478 - DNA, 120 bp, Homo sapiens
  misc_feature: 590 for SV(C|O) and mtDNA
catgtctaacaacatggctttctcaacttttaaaggataacagctatccattggtcttaggccccaaaaattttggtgcaactccaaataaaagtaacaaccatgcacactactataacc

SEQ ID NO: 77479 - DNA, 120 bp, Homo sapiens
  misc_feature: 590 for SV(C|O) and mtDNA
actacaatcttcctaggaacaacatatgacgcactctcccctgaactctacacaacatattttgtcaccaagaccctacttctaacctccctgttcttatgaattcgaacagcatacccc

SEQ ID NO: 77480 - DNA, 120 bp, Homo sapiens
  misc_feature: 590 for SV(C|O) and mtDNA
ctctaccccctctagagcccactgtaaagctaacttagcattaaccttttaagttaaagattaagagaaccaacacctctttacagtgaaatgccccaactaaatactaccgtatggccc

SEQ ID NO: 77481 - DNA, 120 bp, Homo sapiens
  misc_feature: 590 for SV(C|O) and mtDNA
ctgatgttcgccgaccgttgactattctctacaaaccacaaagacattggaacactatacctattattcggcgcatgagctggagtcctaggcacagctctaagcctccttattcgagcc

SEQ ID NO: 77482 - DNA, 120 bp, Homo sapiens
  misc_feature: 590 for SV(C|O) and mtDNA
ggcgccaaggagtgagccgaagtttcatcatgcggagatgttggatggggtggggaggtcgatgaatgagtggttaattaattttattagggggttaattttgcgtattggggtcattgg

SEQ ID NO: 77483 - DNA, 120 bp, Homo sapiens
  misc_feature: 590 for SV(C|O) and mtDNA
caagaacaccaatgaccccaatacgcaaaattaaccccctaataaaattaattaaccactcattcatcgacctccccaccccatccaacatctccgcatgatgaaacttcggctcactcc

SEQ ID NO: 77484 - DNA, 120 bp, Homo sapiens; identical to SEQ ID NO: 61745
  misc_feature: 590 for SV(C|O) and mtDNA

SEQ ID NO: 77485 - DNA, 120 bp, Homo sapiens
  misc_feature: 590 for SV(C|O) and mtDNA
cgaggttagcgaggcttgctagaagtcatcaaaaagctattagtgggagtagagtttgaagtccttgagagaggattatgatgcgactgtgagtgcgttcgtagtttgagtttgctaggc

SEQ ID NO: 77486 - DNA, 120 bp, Homo sapiens
  misc_feature: 590 for SV(C|O) and mtDNA
gccgggaaaaaaggcgggagaagccccggcaggtttgaagctgcttcttcgaatttgcaattcaatatgaaaatcacctcggagctggtaaaaagaggcctaacccctgtctttagattt

SEQ ID NO: 77487 - DNA, 120 bp, Homo sapiens
  misc_feature: 590 for SV(C|O) and mtDNA
gatgacccccctcagataggggtcccttgaccaccatcctccgtgaaatcaatatcccgcacaagagtgctactctcctcgctccgggcccataacacttgggggtagctaaagtgaact

SEQ ID NO: 77488 - DNA, 120 bp, Homo sapiens
  misc_feature: 590 for SV(C|O) and mtDNA
attgggacagacctagttcaatgaatctgaggaggctactcagtagacagtcccaccctcacacgattctttacctttcacttcatcttgcccttcattattgcagccctagcagcactc

SEQ ID NO: 77489 - DNA, 120 bp, Homo sapiens
  misc_feature: 590 for SV(C|O) and mtDNA
gagagtgagtagtagaatgtttagtgagcctagggtgttgtgagtgtaaattagtgcgatgagtaggggaagggagcctactagggtgtagaataggaagtatgtgcctgcgttcaggcg

SEQ ID NO: 77490 - DNA, 120 bp, Homo sapiens
  misc_feature: 590 for SV(C|O) and mtDNA
gacagacctagttcaatgaatctgaggaggctactcagtagacagtcccaccctcacacgattctttacctttcacttcatcttgcccttcattattgcagccctagcagcactccacct

SEQ ID NO: 77491 - DNA, 120 bp, Homo sapiens; identical to SEQ ID NO: 56025
  misc_feature: 590 for SV(C|O) and mtDNA

SEQ ID NO: 77492 - DNA, 120 bp, Homo sapiens
  misc_feature: 590 for SV(C|O) and mtDNA
aaatagcccactaatccaaactctaacactatgcttaggcgctatcaccactctgttcgcagcagtctgcgcccttacacaaaatgacatcaaaaaaatcgtagccttctccacttcaag

SEQ ID NO: 77493 - DNA, 120 bp, Homo sapiens
  misc_feature: 590 for SV(C|O) and mtDNA
cttctgggtcccagaggttacccaaggcacccctctgacatccggcctgcttcttctcacatgacaaaaactagcccccatctcaatcatataccaaatctctccctcactaaacgtaag

SEQ ID NO: 77494 - DNA, 120 bp, Homo sapiens
  misc_feature: 590 for SV(C|O) and mtDNA
cttaccccccactattaacctactgggagaactctctgtgctagtaaccacgttctcctgatcaaatatcactctcctacttacaggactcaacatactagtcacagccctatactccct

SEQ ID NO: 77495 - DNA, 120 bp, Homo sapiens
  misc_feature: 590 for SV(C|O) and mtDNA
cgccgggaaaaaaggcgggagaagccccggcaggtttgaagctgcttcttcgaatttgcaattcaatatgaaaatcacctcggagctggtaaaaagaggcctaacccctgtctttagatt

SEQ ID NO: 77496 - DNA, 120 bp, Homo sapiens
  misc_feature: 590 for SV(C|O) and mtDNA
ccttaatgacattaacactattctcaccagacctcctaggcgacccagacaattataccctagccaaccccttaaacacccctccccacatcaagcccgaatgatatttcctattcgcct

SEQ ID NO: 77497 - DNA, 120 bp, Homo sapiens
  misc_feature: 590 for SV(C|O) and mtDNA
cctatatcccccgcccgcgtccctttctccataaaattcttcttagtagctattaccttcttattatttgatctagaaattgccctccttttacccctaccatgagccctacaaacaact

SEQ ID NO: 77498 - DNA, 120 bp, Homo sapiens; identical to SEQ ID NO: 57159
  misc_feature: 590 for SV(C|O) and mtDNA

SEQ ID NO: 77499 - DNA, 120 bp, Homo sapiens
  misc_feature: 590 for SV(C|O) and mtDNA
aagcttctgactcttacctccctctctcctactcctgctcgcatctgctatagtggaggccggagcaggaacaggttgaacagtctaccctcccttagcagggaactactcccaccctgg

SEQ ID NO: 77500 - DNA, 120 bp, Homo sapiens
  misc_feature: 590 for SV(C|O) and mtDNA
caactacaagaacaccaatgaccccaatacgcaaaattaaccccctaataaaattaattaaccactcattcatcgacctccccaccccatccaacatctccgcatgatgaaacttcggct

SEQ ID NO: 77501 - DNA, 120 bp, Homo sapiens
  misc_feature: 590 for SV(C|O) and mtDNA
atttctctactcagaaacctgaaacatcggcattatcctcctgcttgcaactatagcaacagccttcataggctatgtcctcccgtgaggccaaatatcattctgaggggccacagtaat

SEQ ID NO: 77502 - DNA, 120 bp, Homo sapiens
  misc_feature: 590 for SV(C|O) and mtDNA
atttagttggggcatttcactgtaaagaggtgttggttctcttaatctttaacttaaaaggttaatgctaagttagctttacagtgggctctagagggggtagagggggtgctatagggt

SEQ ID NO: 77503 - DNA, 120 bp, Homo sapiens; identical to SEQ ID NO: 62268
  misc_feature: 590 for SV(C|O) and mtDNA

SEQ ID NO: 77504 - DNA, 120 bp, Homo sapiens; identical to SEQ ID NO: 63176
  misc_feature: 590 for SV(C|O) and mtDNA

SEQ ID NO: 77505 - DNA, 120 bp, Homo sapiens
  misc_feature: 589 for SV(C|O) and mtDNA
tttctctactcagaaacctgaaacatcggcattatcctcctgcttgcaactatagcaacagccttcataggctatgtcctcccgtgaggccaaatatcattctgaggggccacagtaatt

SEQ ID NO: 77506 - DNA, 120 bp, Homo sapiens; identical to SEQ ID NO: 61640
  misc_feature: 589 for SV(C|O) and mtDNA

SEQ ID NO: 77507 - DNA, 120 bp, Homo sapiens
  misc_feature: 589 for SV(C|O) and mtDNA
tgtgtagtaagggtggaaggtgattttatcggaatgggaggtgattcctagggggttgtttgatcccgtttcgtgcaagaataggaggtggagtgctgctagggctgcaataatgaaggg

SEQ ID NO: 77508 - DNA, 120 bp, Homo sapiens
  misc_feature: 589 for SV(C|O) and mtDNA
ctcctgcttgcaactatagcaacagccttcataggctatgtcctcccgtgaggccaaatatcattctgaggggccacagtaattacaaacttactatccgccatcccatacattgggaca

SEQ ID NO: 77509 - DNA, 120 bp, Homo sapiens
  misc_feature: 589 for SV(C|O) and mtDNA
tcaccaagacctcaacccctgacccccatgcctcaggatactcctcaatagccatcgctgtagtatatccaaagacaaccatcattccccctaaataaattaaaaaaactattaaaccca

SEQ ID NO: 77510 - DNA, 120 bp, Homo sapiens
  misc_feature: 589 for SV(C|O) and mtDNA
tgggctactgctcgcagtgcgccgatcagggcgtagtttgagtttgatgctcaccctgatcagaggattgagtaaacggctaggctagaggtggctagaataaataggaggcctaggttg

SEQ ID NO: 77511 - DNA, 120 bp, Homo sapiens
  misc_feature: 589 for SV(C|O) and mtDNA
gtccttgccctattactatccatcctcatcctagcaataatccccatcctccatatatccaaacaacaaagcataatatttcgcccactaagccaatcactttattgactcctagccgca

SEQ ID NO: 77512 - DNA, 120 bp, Homo sapiens
  misc_feature: 589 for SV(C|O) and mtDNA
tgagtggtaggaagttttttcataggaggtgtatgagttggtcgtagcggaatcgggggtatgctgttcgaattcataagaacagggaggttagaagtagggtcttggtgacaaaatatg

SEQ ID NO: 77513 - DNA, 120 bp, Homo sapiens
  misc_feature: 589 for SV(C|O) and mtDNA
tgaatcatccgctaccttcacgccaatggcgcctcaatattctttatctgcctcttcctacacatcgggcgaggcctatattacggatcatttctctactcagaaacctgaaacatcggc

SEQ ID NO: 77514 - DNA, 120 bp, Homo sapiens
  misc_feature: 589 for SV(C|O) and mtDNA
tctcgagtgatgtgggcgattgatgaaaaggcggttgaggcgtctggtgagtagtgcatggctaggaatagtcctgtggtgatttggaggatcaggcaggcgccaaggagtgagccgaag

SEQ ID NO: 77515 - DNA, 120 bp, Homo sapiens
  misc_feature: 589 for SV(C|O) and mtDNA
gccgccgggaaaaaaggcgggagaagccccggcaggtttgaagctgcttcttcgaatttgcaattcaatatgaaaatcacctcggagctggtaaaaagaggcctaacccctgtctttaga

SEQ ID NO: 77516 - DNA, 120 bp, Homo sapiens
  misc_feature: 589 for SV(C|O) and mtDNA
tcgggtgtgttattattctgaattttgggggaggttatatgggtttaatagtttttttaatttatttagggggaatgatggttgtctttggatatactacagcgatggctattgaggagt

SEQ ID NO: 77517 - DNA, 120 bp, Homo sapiens
  misc_feature: 589 for SV(C|O) and mtDNA
cgtctcgagtgatgtgggcgattgatgaaaaggcggttgaggcgtctggtgagtagtgcatggctaggaatagtcctgtggtgatttggaggatcaggcaggcgccaaggagtgagccga

SEQ ID NO: 77518 - DNA, 120 bp, Homo sapiens
  misc_feature: 589 for SV(C|O) and mtDNA
ctattcctagttttattgctatagccattatgattattaatgatgagtattgattggtagtattggttatggttcattgtccggagagtatattgttgaagaggatagctattagaagga

SEQ ID NO: 77519 - DNA, 120 bp, Homo sapiens
  misc_feature: 589 for SV(C|O) and mtDNA
ggtcgggtgtgttattattctgaattttgggggaggttatatgggtttaatagtttttttaatttatttagggggaatgatggttgtctttggatatactacagcgatggctattgagga

SEQ ID NO: 77520 - DNA, 120 bp, Homo sapiens
  misc_feature: 589 for SV(C|O) and mtDNA
tcatatgagattgtttgggctactgctcgcagtgcgccgatcagggcgtagtttgagtttgatgctcaccctgatcagaggattgagtaaacggctaggctagaggtggctagaataaat

SEQ ID NO: 77521 - DNA, 120 bp, Homo sapiens
  misc_feature: 589 for SV(C|O) and mtDNA
atggatgacccccctcagataggggtcccttgaccaccatcctccgtgaaatcaatatcccgcacaagagtgctactctcctcgctccgggcccataacacttgggggtagctaaagtga

SEQ ID NO: 77522 - DNA, 120 bp, Homo sapiens
  misc_feature: 589 for SV(C|O) and mtDNA
tcacgatggatcacaggtctatcaccctattaaccactcacgggagctctccatgcatttggtattttcgtctggggggtgtgcacgcgatagcattgcgagacgctggagccggagcac

SEQ ID NO: 77523 - DNA, 120 bp, Homo sapiens
  misc_feature: 589 for SV(C|O) and mtDNA
tatttagttggggcatttcactgtaaagaggtgttggttctcttaatctttaacttaaaaggttaatgctaagttagctttacagtgggctctagagggggtagagggggtgctataggg

SEQ ID NO: 77524 - DNA, 120 bp, Homo sapiens
  misc_feature: 589 for SV(C|O) and mtDNA
ctagcaagcctcgctaacctcgccttaccccccactattaacctactgggagaactctctgtgctagtaaccacgttctcctgatcaaatatcactctcctacttacaggactcaacata

SEQ ID NO: 77525 - DNA, 120 bp, Homo sapiens
  misc_feature: 589 for SV(C|O) and mtDNA
tatcctcctgcttgcaactatagcaacagccttcataggctatgtcctcccgtgaggccaaatatcattctgaggggccacagtaattacaaacttactatccgccatcccatacattgg

SEQ ID NO: 77526 - DNA, 120 bp, Homo sapiens
  misc_feature: 589 for SV(C|O) and mtDNA
cataaacaacataagcttctgactcttacctccctctctcctactcctgctcgcatctgctatagtggaggccggagcaggaacaggttgaacagtctaccctcccttagcagggaacta

SEQ ID NO: 77527 - DNA, 120 bp, Homo sapiens; identical to SEQ ID NO: 59929
  misc_feature: 589 for SV(C|O) and mtDNA

SEQ ID NO: 77528 - DNA, 120 bp, Homo sapiens
  misc_feature: 589 for SV(C|O) and mtDNA
aaaaaatcagtgcgagcttagcgctgtgatgagtgtgcctgcaaagatggtagagtagatgacgggttgggccaggggattaattagtacgggaagggtataaccaacattttcggggta

SEQ ID NO: 77529 - DNA, 120 bp, Homo sapiens
  misc_feature: 589 for SV(C|O) and mtDNA
agaccctacttctaacctccctgttcttatgaattcgaacagcatacccccgattccgctacgaccaactcatacacctcctatgaaaaaacttcctaccactcaccctagcattactta

SEQ ID NO: 77530 - DNA, 120 bp, Homo sapiens
  misc_feature: 589 for SV(C|O) and mtDNA
acaacatggctttctcaacttttaaaggataacagctatccattggtcttaggccccaaaaattttggtgcaactccaaataaaagtaacaaccatgcacactactataaccaccctaac

SEQ ID NO: 77531 - DNA, 120 bp, Homo sapiens
  misc_feature: 589 for SV(C|O) and mtDNA
gactcgccacactccacggaagcaatatgaaatgatctgctgcagtgctctgagccctaggattcatctttcttttcaccgtaggcggcctgactggcattgtattagcaaactcatcac

SEQ ID NO: 77532 - DNA, 120 bp, Homo sapiens
  misc_feature: 589 for SV(C|O) and mtDNA
ccccctttcacttctgggtcccagaggttacccaaggcacccctctgacatccggcctgcttcttctcacatgacaaaaactagcccccatctcaatcatataccaaatctctccctcac

SEQ ID NO: 77533 - DNA, 120 bp, Homo sapiens; identical to SEQ ID NO: 60108
  misc_feature: 589 for SV(C|O) and mtDNA

SEQ ID NO: 77534 - DNA, 120 bp, Homo sapiens; identical to SEQ ID NO: 60355
  misc_feature: 589 for SV(C|O) and mtDNA

SEQ ID NO: 77535 - DNA, 120 bp, Homo sapiens
  misc_feature: 589 for SV(C|O) and mtDNA
ctctccggacaatgaaccataaccaatactaccaatcaatactcatcattaataatcataatggctatagcaataaaactaggaatagccccctttcacttctgggtcccagaggttacc

SEQ ID NO: 77536 - DNA, 120 bp, Homo sapiens
  misc_feature: 589 for SV(C|O) and mtDNA
cactacaatcttcctaggaacaacatatgacgcactctcccctgaactctacacaacatattttgtcaccaagaccctacttctaacctccctgttcttatgaattcgaacagcataccc

SEQ ID NO: 77537 - DNA, 120 bp, Homo sapiens
  misc_feature: 589 for SV(C|O) and mtDNA
ggcaaaaagccggttagcgggggcaggcctcctagggagaggagggtggatggaattaagggtgttagtcatgttagcttgtttcaggtgcgagatagtagtagggtcgtggtgctggag

SEQ ID NO: 77538 - DNA, 120 bp, Homo sapiens
  misc_feature: 589 for SV(C|O) and mtDNA
ggactcaacatactagtcacagccctatactccctctacatatttaccacaacacaatggggctcactcacccaccacattaacaacataaaaccctcattcacacgagaaaacaccctc

SEQ ID NO: 77539 - DNA, 120 bp, Homo sapiens
  misc_feature: 589 for SV(C|O) and mtDNA
cgccatcccatacattgggacagacctagttcaatgaatctgaggaggctactcagtagacagtcccaccctcacacgattctttacctttcacttcatcttgcccttcattattgcagc

SEQ ID NO: 77540 - DNA, 120 bp, Homo sapiens
  misc_feature: 589 for SV(C|O) and mtDNA
gctattcctagttttattgctatagccattatgattattaatgatgagtattgattggtagtattggttatggttcattgtccggagagtatattgttgaagaggatagctattagaagg

SEQ ID NO: 77541 - DNA, 120 bp, Homo sapiens
  misc_feature: 589 for SV(C|O) and mtDNA
aatactaccaatcaatactcatcattaataatcataatggctatagcaataaaactaggaatagccccctttcacttctgggtcccagaggttacccaaggcacccctctgacatccggc

SEQ ID NO: 77542 - DNA, 120 bp, Homo sapiens
  misc_feature: 589 for SV(C|O) and mtDNA
gccacagcttaaaactcaaaggacctggcggtgcttcatatccctctagaggagcctgttctgtaatcgataaaccccgatcaacctcaccacctcttgctcagcctatataccgccatc

SEQ ID NO: 77543 - DNA, 120 bp, Homo sapiens
  misc_feature: 589 for SV(C|O) and mtDNA
gaggtggagatttggtgctgtgaaattgttttaggtaatagcttttctagtcaggttaggtctaggaggagtaggggcaggttttggctcgtaagaaggcctagataggggattgtgcgg

SEQ ID NO: 77544 - DNA, 120 bp, Homo sapiens
  misc_feature: 589 for SV(C|O) and mtDNA
caaacgcccctcttcgtctgatccgtcctaatcacagcagtcctacttctcctatctctcccagtcctagctgctggcatcactatactactaacagaccgcaacctcaacaccaccttc

SEQ ID NO: 77545 - DNA, 120 bp, Homo sapiens; identical to SEQ ID NO: 61842
  misc_feature: 589 for SV(C|O) and mtDNA

SEQ ID NO: 77546 - DNA, 120 bp, Homo sapiens
  misc_feature: 589 for SV(C|O) and mtDNA
atgttcgccgaccgttgactattctctacaaaccacaaagacattggaacactatacctattattcggcgcatgagctggagtcctaggcacagctctaagcctccttattcgagccgag

SEQ ID NO: 77547 - DNA, 120 bp, Homo sapiens
  misc_feature: 589 for SV(C|O) and mtDNA
ataatgggggtatgagttttttttgttagggttaacgagggtggtaaggatggggggaattagggaagtcagggttagggtggttatagtagtgtgcatggttgttacttttatttggag

SEQ ID NO: 77548 - DNA, 120 bp, Homo sapiens
  misc_feature: 589 for SV(C|O) and mtDNA
ctaacaacatggctttctcaacttttaaaggataacagctatccattggtcttaggccccaaaaattttggtgcaactccaaataaaagtaacaaccatgcacactactataaccaccct

SEQ ID NO: 77549 - DNA, 120 bp, Homo sapiens
  misc_feature: 589 for SV(C|O) and mtDNA
caagtgcactttccagtacacttaccatgttacgacttgtctcctctatataaatgcgtaggggttttagttaaatgtcctttgaagtatacttgaggagggtgacgggcggtgtgtacg

SEQ ID NO: 77550 - DNA, 120 bp, Homo sapiens
  misc_feature: 589 for SV(C|O) and mtDNA
cctagggctcagagcactgcagcagatcatttcatattgcttccgtggagtgtggcgagtcagctaaatactttgacgccggtggggatagcgatgattatggtagcggaggtgaaatat

SEQ ID NO: 77551 - DNA, 120 bp, Homo sapiens
  misc_feature: 589 for SV(C|O) and mtDNA
catcgcgccatcattggtatatggttagtgtgttggttagtaggcctagtatgaggagcgttatggagtggaagtgaaatcacatggctaggccggaggtcattaggagggctgagaggg

SEQ ID NO: 77552 - DNA, 120 bp, Homo sapiens; identical to SEQ ID NO: 54049
  misc_feature: 589 for SV(C|O) and mtDNA

SEQ ID NO: 77553 - DNA, 120 bp, Homo sapiens
  misc_feature: 589 for SV(C|O) and mtDNA
aagagtatgatggggtggtggttgtggtaaactttaatagtgtaggaagctgaataatttatgaaggagaggggtcagggttgattcgggaggatcctattggtgcgggggctttgtatg

SEQ ID NO: 77554 - DNA, 120 bp, Homo sapiens
  misc_feature: 589 for SV(C|O) and mtDNA
atcactgttcattatagctactctcataaccctcaacacccactccctcttagccaatattgtgcctattgccatactagtctttgccgcctgcgaagcagcggtgggcctagccctact

SEQ ID NO: 77555 - DNA, 120 bp, Homo sapiens
  misc_feature: 589 for SV(C|O) and mtDNA
agtgggctattttctgctagggggtggaagcggatgagtaagaagattcctgctacaactatagtgcttgagtggagtagggctgagactggggtggggccttctatggctgaggggagt

SEQ ID NO: 77556 - DNA, 120 bp, Homo sapiens
  misc_feature: 589 for SV(C|O) and mtDNA
aatcaatactcatcattaataatcataatggctatagcaataaaactaggaatagccccctttcacttctgggtcccagaggttacccaaggcacccctctgacatccggcctgcttctt

SEQ ID NO: 77557 - DNA, 120 bp, Homo sapiens
  misc_feature: 588 for SV(C|O) and mtDNA
attcctaatgcttaccgaacgaaaaattctaggctatatacaactacgcaaaggccccaacgttgtaggcccctacgggctactacaacccttcgctgacgccataaaactcttcaccaa

SEQ ID NO: 77558 - DNA, 120 bp, Homo sapiens; identical to SEQ ID NO: 62289
  misc_feature: 588 for SV(C|O) and mtDNA

SEQ ID NO: 77559 - DNA, 120 bp, Homo sapiens
  misc_feature: 588 for SV(C|O) and mtDNA
ttgatggtaagggagggatcgttgacctcgtctgttatgtaaaggatgcgcagggatgggagggcgatgaggactaggatgatggcgggcaggatagttcagacggtttctatttcctga

SEQ ID NO: 77560 - DNA, 120 bp, Homo sapiens
  misc_feature: 588 for SV(C|O) and mtDNA
tgcgactgtgagtgcgttcgtagtttgagtttgctaggcagaatagtaatgaggatgtaagtccgtgggcgattatgagaatgactgcgccggtgaagcttcagggggtttggatgagaa

SEQ ID NO: 77561 - DNA, 120 bp, Homo sapiens
  misc_feature: 588 for SV(C|O) and mtDNA
acatcctatcatctgtaggctcattcatttctctaacagcagtaatattaataattttcatgatttgagaagccttcgcttcgaagcgaaaagtcctaatagtagaagaaccctccataa

SEQ ID NO: 77562 - DNA, 120 bp, Homo sapiens
  misc_feature: 588 for SV(C|O) and mtDNA
accccttccttgtactatccctatgaggcataattataacaagctccatctgcctacgacaaacagacctaaaatcgctcattgcatactcttcaatcagccacatagccctcgtagtaa

SEQ ID NO: 77563 - DNA, 120 bp, Homo sapiens; identical to SEQ ID NO: 62679
  misc_feature: 588 for SV(C|O) and mtDNA

SEQ ID NO: 77564 - DNA, 120 bp, Homo sapiens
  misc_feature: 588 for SV(C|O) and mtDNA
gcaagatgaagtgaaaggtaaagaatcgtgtgagggtgggactgtctactgagtagcctcctcagattcattgaactaggtctgtcccaatgtatgggatggcggatagtaagtttgtaa

SEQ ID NO: 77565 - DNA, 120 bp, Homo sapiens
  misc_feature: 588 for SV(C|O) and mtDNA
ttaatagtggggggtaaggcgaggttagcgaggcttgctagaagtcatcaaaaagctattagtgggagtagagtttgaagtccttgagagaggattatgatgcgactgtgagtgcgttcg

SEQ ID NO: 77566 - DNA, 120 bp, Homo sapiens
  misc_feature: 588 for SV(C|O) and mtDNA
acacaatcaaagacgccctcggcttacttctcttccttctctccttaatgacattaacactattctcaccagacctcctaggcgacccagacaattataccctagccaaccccttaaaca

SEQ ID NO: 77567 - DNA, 120 bp, Homo sapiens; identical to SEQ ID NO: 62398
  misc_feature: 588 for SV(C|O) and mtDNA

SEQ ID NO: 77568 - DNA, 120 bp, Homo sapiens
  misc_feature: 588 for SV(C|O) and mtDNA
tgatcacgccctcataatcattttccttatctgcttcctagtcctgtatgcccttttcctaacactcacaacaaaactaactaatactaacatctcagacgctcaggaaatagaaaccgt

SEQ ID NO: 77569 - DNA, 120 bp, Homo sapiens
  misc_feature: 588 for SV(C|O) and mtDNA
aacagccattctcatccaaaccccctgaagcttcaccggcgcagtcattctcataatcgcccacggacttacatcctcattactattctgcctagcaaactcaaactacgaacgcactca

SEQ ID NO: 77570 - DNA, 120 bp, Homo sapiens
  misc_feature: 588 for SV(C|O) and mtDNA
tctagcaagcctcgctaacctcgccttaccccccactattaacctactgggagaactctctgtgctagtaaccacgttctcctgatcaaatatcactctcctacttacaggactcaacat

SEQ ID NO: 77571 - DNA, 120 bp, Homo sapiens
  misc_feature: 588 for SV(C|O) and mtDNA
gtaaggagaagatggttaggtctacggaggctccagggtgggagtagttccctgctaagggagggtagactgttcaacctgttcctgctccggcctccactatagcagatgcgagcagga

SEQ ID NO: 77572 - DNA, 120 bp, Homo sapiens; identical to SEQ ID NO: 61132
  misc_feature: 588 for SV(C|O) and mtDNA

SEQ ID NO: 77573 - DNA, 120 bp, Homo sapiens; identical to SEQ ID NO: 62442
  misc_feature: 588 for SV(C|O) and mtDNA

SEQ ID NO: 77574 - DNA, 120 bp, Homo sapiens; identical to SEQ ID NO: 58288
  misc_feature: 588 for SV(C|O) and mtDNA

SEQ ID NO: 77575 - DNA, 120 bp, Homo sapiens
  misc_feature: 588 for SV(C|O) and mtDNA
taggaggactactcaaaaccatacctctcacttcaacctccctcaccattggcagcctagcattagcaggaatacctttcctcacaggtttctactccaaagaccacatcatcgaaaccg

SEQ ID NO: 77576 - DNA, 120 bp, Homo sapiens
  misc_feature: 588 for SV(C|O) and mtDNA
tagcaagcctcgctaacctcgccttaccccccactattaacctactgggagaactctctgtgctagtaaccacgttctcctgatcaaatatcactctcctacttacaggactcaacatac

SEQ ID NO: 77577 - DNA, 120 bp, Homo sapiens
  misc_feature: 588 for SV(C|O) and mtDNA
gaggcagataaagaatattgaggcgccattggcgtgaaggtagcggatgattcagccataatttacgtctcgagtgatgtgggcgattgatgaaaaggcggttgaggcgtctggtgagta

SEQ ID NO: 77578 - DNA, 120 bp, Homo sapiens
  misc_feature: 588 for SV(C|O) and mtDNA
taatagtggggggtaaggcgaggttagcgaggcttgctagaagtcatcaaaaagctattagtgggagtagagtttgaagtccttgagagaggattatgatgcgactgtgagtgcgttcgt

SEQ ID NO: 77579 - DNA, 120 bp, Homo sapiens
  misc_feature: 588 for SV(C|O) and mtDNA
gactcataatagttacaatcggcatcaaccaaccacacctagcattcctgcacatctgtacccacgccttcttcaaagccatactatttatgtgctccgggtccatcatccacaacctta

SEQ ID NO: 77580 - DNA, 120 bp, Homo sapiens
  misc_feature: 588 for SV(C|O) and mtDNA
taaaaaatcagtgcgagcttagcgctgtgatgagtgtgcctgcaaagatggtagagtagatgacgggttgggccaggggattaattagtacgggaagggtataaccaacattttcggggt

SEQ ID NO: 77581 - DNA, 120 bp, Homo sapiens; identical to SEQ ID NO: 61655
  misc_feature: 588 for SV(C|O) and mtDNA

SEQ ID NO: 77582 - DNA, 120 bp, Homo sapiens
  misc_feature: 588 for SV(C|O) and mtDNA
ccctatatcccccgcccgcgtccctttctccataaaattcttcttagtagctattaccttcttattatttgatctagaaattgccctccttttacccctaccatgagccctacaaacaac

SEQ ID NO: 77583 - DNA, 120 bp, Homo sapiens; identical to SEQ ID NO: 62172
  misc_feature: 588 for SV(C|O) and mtDNA

SEQ ID NO: 77584 - DNA, 120 bp, Homo sapiens
  misc_feature: 588 for SV(C|O) and mtDNA
cctcctgcttgcaactatagcaacagccttcataggctatgtcctcccgtgaggccaaatatcattctgaggggccacagtaattacaaacttactatccgccatcccatacattgggac

SEQ ID NO: 77585 - DNA, 120 bp, Homo sapiens
  misc_feature: 588 for SV(C|O) and mtDNA
ccaagtgcactttccagtacacttaccatgttacgacttgtctcctctatataaatgcgtaggggttttagttaaatgtcctttgaagtatacttgaggagggtgacgggcggtgtgtac

SEQ ID NO: 77586 - DNA, 120 bp, Homo sapiens
  misc_feature: 588 for SV(C|O) and mtDNA
actctccggacaatgaaccataaccaatactaccaatcaatactcatcattaataatcataatggctatagcaataaaactaggaatagccccctttcacttctgggtcccagaggttac

SEQ ID NO: 77587 - DNA, 120 bp, Homo sapiens; identical to SEQ ID NO: 61658
  misc_feature: 588 for SV(C|O) and mtDNA

SEQ ID NO: 77588 - DNA, 120 bp, Homo sapiens
  misc_feature: 588 for SV(C|O) and mtDNA
gcgacccagacaattataccctagccaaccccttaaacacccctccccacatcaagcccgaatgatatttcctattcgcctacacaattctccgatccgtccctaacaaactaggaggcg

SEQ ID NO: 77589 - DNA, 120 bp, Homo sapiens
  misc_feature: 588 for SV(C|O) and mtDNA
aggtggcaagaaatgggctacattttctaccccagaaaactacgatagcccttatgaaacttaagggtcgaaggtggatttagcagtaaactgagagtagagtgcttagttgaacagggc

SEQ ID NO: 77590 - DNA, 120 bp, Homo sapiens
  misc_feature: 588 for SV(C|O) and mtDNA
gatgtctagtgatgagtttgctaatacaatgccagtcaggccgcctacggtgaaaagaaagatgaatcctagggctcagagcactgcagcagatcatttcatattgcttccgtggagtgt

SEQ ID NO: 77591 - DNA, 120 bp, Homo sapiens; identical to SEQ ID NO: 62863
  misc_feature: 588 for SV(C|O) and mtDNA

SEQ ID NO: 77592 - DNA, 120 bp, Homo sapiens
  misc_feature: 588 for SV(C|O) and mtDNA
ctgagaatccaaaattctccgtgccacctatcacaccccatcctaaagtaaggtcagctaaataagctatcgggcccataccccgaaaatgttggttatacccttcccgtactaattaat

SEQ ID NO: 77593 - DNA, 120 bp, Homo sapiens
  misc_feature: 588 for SV(C|O) and mtDNA
accctaatcaactggcttcaatctacttctcccgccgccgggaaaaaaggcgggagaagccccggcaggtttgaagctgcttcttcgaatttgcaattcaatatgaaaatcacctcggag

SEQ ID NO: 77594 - DNA, 120 bp, Homo sapiens
  misc_feature: 588 for SV(C|O) and mtDNA
acccaccaatcacatgcctatcatatagtaaaacccagcccatgacccctaacaggggccctctcagccctcctaatgacctccggcctagccatgtgatttcacttccactccataacg

SEQ ID NO: 77595 - DNA, 120 bp, Homo sapiens
  misc_feature: 588 for SV(C|O) and mtDNA
acgtctcgagtgatgtgggcgattgatgaaaaggcggttgaggcgtctggtgagtagtgcatggctaggaatagtcctgtggtgatttggaggatcaggcaggcgccaaggagtgagccg

SEQ ID NO: 77596 - DNA, 120 bp, Homo sapiens; identical to SEQ ID NO: 62341
  misc_feature: 588 for SV(C|O) and mtDNA

SEQ ID NO: 77597 - DNA, 120 bp, Homo sapiens
  misc_feature: 588 for SV(C|O) and mtDNA
caagatgaagtgaaaggtaaagaatcgtgtgagggtgggactgtctactgagtagcctcctcagattcattgaactaggtctgtcccaatgtatgggatggcggatagtaagtttgtaat

SEQ ID NO: 77598 - DNA, 120 bp, Homo sapiens
  misc_feature: 588 for SV(C|O) and mtDNA
agcccatgaggtggcaagaaatgggctacattttctaccccagaaaactacgatagcccttatgaaacttaagggtcgaaggtggatttagcagtaaactgagagtagagtgcttagttg

SEQ ID NO: 77599 - DNA, 120 bp, Homo sapiens; identical to SEQ ID NO: 60888
  misc_feature: 587 for SV(C|O) and mtDNA

SEQ ID NO: 77600 - DNA, 120 bp, Homo sapiens; identical to SEQ ID NO: 58700
  misc_feature: 587 for SV(C|O) and mtDNA

SEQ ID NO: 77601 - DNA, 120 bp, Homo sapiens
  misc_feature: 587 for SV(C|O) and mtDNA
tctatctacttcaaattcctccctgtacgaaaggacaagagaaataaggcctacttcacaaagcgccttcccccgtaaatgatatcatctcaacttagtattatacccacacccacccaa

SEQ ID NO: 77602 - DNA, 120 bp, Homo sapiens
  misc_feature: 587 for SV(C|O) and mtDNA
ttgggtcttagctattgtgtgttcagatatgttaaagccactttcgtagtctattttgtgtcagctggagttttttacaactcaggtgagttttagctttattggggagggggtgatcta

SEQ ID NO: 77603 - DNA, 120 bp, Homo sapiens
  misc_feature: 587 for SV(C|O) and mtDNA
gttgttagggggtcggaggaaaaggttggggaacagctaaataggttgttgttgatttggttaaaaaatagtagagggatgatgctaataattaggctgtgggtggttgtgttgattcaa

SEQ ID NO: 77604 - DNA, 120 bp, Homo sapiens
  misc_feature: 587 for SV(C|O) and mtDNA
accacatgaaacatcctatcatctgtaggctcattcatttctctaacagcagtaatattaataattttcatgatttgagaagccttcgcttcgaagcgaaaagtcctaatagtagaagaa

SEQ ID NO: 77605 - DNA, 120 bp, Homo sapiens
  misc_feature: 587 for SV(C|O) and mtDNA
ttctgggtcccagaggttacccaaggcacccctctgacatccggcctgcttcttctcacatgacaaaaactagcccccatctcaatcatataccaaatctctccctcactaaacgtaagc

SEQ ID NO: 77606 - DNA, 120 bp, Homo sapiens; identical to SEQ ID NO: 58099
  misc_feature: 587 for SV(C|O) and mtDNA

SEQ ID NO: 77607 - DNA, 120 bp, Homo sapiens
  misc_feature: 587 for SV(C|O) and mtDNA
ttatcctcctgcttgcaactatagcaacagccttcataggctatgtcctcccgtgaggccaaatatcattctgaggggccacagtaattacaaacttactatccgccatcccatacattg

SEQ ID NO: 77608 - DNA, 120 bp, Homo sapiens
  misc_feature: 587 for SV(C|O) and mtDNA
ttagttggggcatttcactgtaaagaggtgttggttctcttaatctttaacttaaaaggttaatgctaagttagctttacagtgggctctagagggggtagagggggtgctatagggtaa

SEQ ID NO: 77609 - DNA, 120 bp, Homo sapiens
  misc_feature: 587 for SV(C|O) and mtDNA
aacaacatggctttctcaacttttaaaggataacagctatccattggtcttaggccccaaaaattttggtgcaactccaaataaaagtaacaaccatgcacactactataaccaccctaa

SEQ ID NO: 77610 - DNA, 120 bp, Homo sapiens; identical to SEQ ID NO: 56532
  misc_feature: 587 for SV(C|O) and mtDNA

SEQ ID NO: 77611 - DNA, 120 bp, Homo sapiens
  misc_feature: 587 for SV(C|O) and mtDNA
cccttccttgtactatccctatgaggcataattataacaagctccatctgcctacgacaaacagacctaaaatcgctcattgcatactcttcaatcagccacatagccctcgtagtaaca

SEQ ID NO: 77612 - DNA, 120 bp, Homo sapiens
  misc_feature: 587 for SV(C|O) and mtDNA
tgtctaacaacatggctttctcaacttttaaaggataacagctatccattggtcttaggccccaaaaattttggtgcaactccaaataaaagtaacaaccatgcacactactataaccac

SEQ ID NO: 77613 - DNA, 120 bp, Homo sapiens; identical to SEQ ID NO: 57268
  misc_feature: 587 for SV(C|O) and mtDNA

SEQ ID NO: 77614 - DNA, 120 bp, Homo sapiens
  misc_feature: 587 for SV(C|O) and mtDNA
ccatacattgggacagacctagttcaatgaatctgaggaggctactcagtagacagtcccaccctcacacgattctttacctttcacttcatcttgcccttcattattgcagccctagca

SEQ ID NO: 77615 - DNA, 120 bp, Homo sapiens; identical to SEQ ID NO: 61112
  misc_feature: 587 for SV(C|O) and mtDNA

SEQ ID NO: 77616 - DNA, 120 bp, Homo sapiens
  misc_feature: 587 for SV(C|O) and mtDNA
tccttctctccttaatgacattaacactattctcaccagacctcctaggcgacccagacaattataccctagccaaccccttaaacacccctccccacatcaagcccgaatgatatttcc

SEQ ID NO: 77617 - DNA, 120 bp, Homo sapiens
  misc_feature: 587 for SV(C|O) and mtDNA
tcctacactattaaagtttaccacaaccaccaccccatcatactctttcacccacagcaccaatcctacctccatcgctaaccccactaaaacactcaccaagacctcaacccctgaccc

SEQ ID NO: 77618 - DNA, 120 bp, Homo sapiens; identical to SEQ ID NO: 56050
  misc_feature: 587 for SV(C|O) and mtDNA

SEQ ID NO: 77619 - DNA, 120 bp, Homo sapiens
  misc_feature: 587 for SV(C|O) and mtDNA
tatgatgcgactgtgagtgcgttcgtagtttgagtttgctaggcagaatagtaatgaggatgtaagtccgtgggcgattatgagaatgactgcgccggtgaagcttcagggggtttggat

SEQ ID NO: 77620 - DNA, 120 bp, Homo sapiens
  misc_feature: 587 for SV(C|O) and mtDNA
caaactctaacactatgcttaggcgctatcaccactctgttcgcagcagtctgcgcccttacacaaaatgacatcaaaaaaatcgtagccttctccacttcaagtcaactaggactcata

SEQ ID NO: 77621 - DNA, 120 bp, Homo sapiens
  misc_feature: 587 for SV(C|O) and mtDNA
taggttaatagtggggggtaaggcgaggttagcgaggcttgctagaagtcatcaaaaagctattagtgggagtagagtttgaagtccttgagagaggattatgatgcgactgtgagtgcg

SEQ ID NO: 77622 - DNA, 120 bp, Homo sapiens
  misc_feature: 587 for SV(C|O) and mtDNA
gccacctctagcctagccgtttactcaatcctctgatcagggtgagcatcaaactcaaactacgccctgatcggcgcactgcgagcagtagcccaaacaatctcatatgaagtcacccta

SEQ ID NO: 77623 - DNA, 120 bp, Homo sapiens
  misc_feature: 587 for SV(C|O) and mtDNA
ctctacatatttaccacaacacaatggggctcactcacccaccacattaacaacataaaaccctcattcacacgagaaaacaccctcatgttcatacacctatcccccattctcctccta

SEQ ID NO: 77624 - DNA, 120 bp, Homo sapiens; identical to SEQ ID NO: 63155
  misc_feature: 587 for SV(C|O) and mtDNA

SEQ ID NO: 77625 - DNA, 120 bp, Homo sapiens
  misc_feature: 587 for SV(C|O) and mtDNA
taatctactccacctcaatcacactactccccatatctaacaacgtaaaaataaaatgacagtttgaacatacaaaacccaccccattcctccccacactcatcgcccttaccacgctac

SEQ ID NO: 77626 - DNA, 120 bp, Homo sapiens
  misc_feature: 587 for SV(C|O) and mtDNA
cacaatcaaagacgccctcggcttacttctcttccttctctccttaatgacattaacactattctcaccagacctcctaggcgacccagacaattataccctagccaaccccttaaacac

SEQ ID NO: 77627 - DNA, 120 bp, Homo sapiens
  misc_feature: 587 for SV(C|O) and mtDNA
cttcctacactattaaagtttaccacaaccaccaccccatcatactctttcacccacagcaccaatcctacctccatcgctaaccccactaaaacactcaccaagacctcaacccctgac

SEQ ID NO: 77628 - DNA, 120 bp, Homo sapiens; identical to SEQ ID NO: 59095
  misc_feature: 587 for SV(C|O) and mtDNA

SEQ ID NO: 77629 - DNA, 120 bp, Homo sapiens; identical to SEQ ID NO: 62865
  misc_feature: 587 for SV(C|O) and mtDNA

SEQ ID NO: 77630 - DNA, 120 bp, Homo sapiens; identical to SEQ ID NO: 62477
  misc_feature: 587 for SV(C|O) and mtDNA

SEQ ID NO: 77631 - DNA, 120 bp, Homo sapiens
  misc_feature: 587 for SV(C|O) and mtDNA
cctctaccccctctagagcccactgtaaagctaacttagcattaaccttttaagttaaagattaagagaaccaacacctctttacagtgaaatgccccaactaaatactaccgtatggcc

SEQ ID NO: 77632 - DNA, 120 bp, Homo sapiens
  misc_feature: 587 for SV(C|O) and mtDNA
acctccctgttcttatgaattcgaacagcatacccccgattccgctacgaccaactcatacacctcctatgaaaaaacttcctaccactcaccctagcattacttatatgatatgtctcc

SEQ ID NO: 77633 - DNA, 120 bp, Homo sapiens
  misc_feature: 587 for SV(C|O) and mtDNA
aggaggactactcaaaaccatacctctcacttcaacctccctcaccattggcagcctagcattagcaggaatacctttcctcacaggtttctactccaaagaccacatcatcgaaaccgc

SEQ ID NO: 77634 - DNA, 120 bp, Homo sapiens
  misc_feature: 587 for SV(C|O) and mtDNA
gcgaggttagcgaggcttgctagaagtcatcaaaaagctattagtgggagtagagtttgaagtccttgagagaggattatgatgcgactgtgagtgcgttcgtagtttgagtttgctagg

SEQ ID NO: 77635 - DNA, 120 bp, Homo sapiens
  misc_feature: 587 for SV(C|O) and mtDNA
gccatcatcctagtcctcatcgccctcccatccctgcgcatcctttacataacagacgaggtcaacgatccctcccttaccatcaaatcaattggccaccaatggtactgaacctacgag

SEQ ID NO: 77636 - DNA, 120 bp, Homo sapiens
  misc_feature: 587 for SV(C|O) and mtDNA
gatgggttcgattctcatagtcctagaaataagggggtttaagctcctattatttactctatcaaagtaactcttttatcagacatatttcttaggtttgagggggaatgctggagattg

SEQ ID NO: 77637 - DNA, 120 bp, Homo sapiens
  misc_feature: 587 for SV(C|O) and mtDNA
cctactcctgctcgcatctgctatagtggaggccggagcaggaacaggttgaacagtctaccctcccttagcagggaactactcccaccctggagcctccgtagacctaaccatcttctc

SEQ ID NO: 77638 - DNA, 120 bp, Homo sapiens
  misc_feature: 587 for SV(C|O) and mtDNA
cccctctacctaaaactcacagccctcgctgtcactttcctaggacttctaacagccctagacctcaactacctaaccaacaaacttaaaataaaatccccactatgcacattttatttc

SEQ ID NO: 77639 - DNA, 120 bp, Homo sapiens; identical to SEQ ID NO: 58934
  misc_feature: 587 for SV(C|O) and mtDNA

SEQ ID NO: 77640 - DNA, 120 bp, Homo sapiens
  misc_feature: 587 for SV(C|O) and mtDNA
cttctactattaggacttttcgcttcgaagcgaaggcttctcaaatcatgaaaattattaatattactgctgttagagaaatgaatgagcctacagatgataggatgtttcatgtggtgt

SEQ ID NO: 77641 - DNA, 120 bp, Homo sapiens
  misc_feature: 587 for SV(C|O) and mtDNA
ctagggctcagagcactgcagcagatcatttcatattgcttccgtggagtgtggcgagtcagctaaatactttgacgccggtggggatagcgatgattatggtagcggaggtgaaatatg

SEQ ID NO: 77642 - DNA, 120 bp, Homo sapiens
  misc_feature: 587 for SV(C|O) and mtDNA
cgtgtcgtgtagtacgatgtctagtgatgagtttgctaatacaatgccagtcaggccgcctacggtgaaaagaaagatgaatcctagggctcagagcactgcagcagatcatttcatatt

SEQ ID NO: 77643 - DNA, 120 bp, Homo sapiens
  misc_feature: 587 for SV(C|O) and mtDNA
atggtaagggagggatcgttgacctcgtctgttatgtaaaggatgcgcagggatgggagggcgatgaggactaggatgatggcgggcaggatagttcagacggtttctatttcctgagcg

SEQ ID NO: 77644 - DNA, 120 bp, Homo sapiens
  misc_feature: 587 for SV(C|O) and mtDNA
cctagcagcagcaggcaaatcagcccaattaggtctccacccctgactcccctcagccatagaaggccccaccccagtctcagccctactccactcaagcactatagttgtagcaggaat

SEQ ID NO: 77645 - DNA, 120 bp, Homo sapiens; identical to SEQ ID NO: 55898
  misc_feature: 587 for SV(C|O) and mtDNA

SEQ ID NO: 77646 - DNA, 120 bp, Homo sapiens
  misc_feature: 587 for SV(C|O) and mtDNA
caatcaatactcatcattaataatcataatggctatagcaataaaactaggaatagccccctttcacttctgggtcccagaggttacccaaggcacccctctgacatccggcctgcttct

SEQ ID NO: 77647 - DNA, 120 bp, Homo sapiens; identical to SEQ ID NO: 56750
  misc_feature: 587 for SV(C|O) and mtDNA

SEQ ID NO: 77648 - DNA, 120 bp, Homo sapiens
  misc_feature: 587 for SV(C|O) and mtDNA
atgatggaggtggagatttggtgctgtgaaattgttttaggtaatagcttttctagtcaggttaggtctaggaggagtaggggcaggttttggctcgtaagaaggcctagataggggatt

SEQ ID NO: 77649 - DNA, 120 bp, Homo sapiens
  misc_feature: 587 for SV(C|O) and mtDNA
atcacatgcctatcatatagtaaaacccagcccatgacccctaacaggggccctctcagccctcctaatgacctccggcctagccatgtgatttcacttccactccataacgctcctcat

SEQ ID NO: 77650 - DNA, 120 bp, Homo sapiens
  misc_feature: 587 for SV(C|O) and mtDNA
acgtgtcgtgtagtacgatgtctagtgatgagtttgctaatacaatgccagtcaggccgcctacggtgaaaagaaagatgaatcctagggctcagagcactgcagcagatcatttcatat

SEQ ID NO: 77651 - DNA, 120 bp, Homo sapiens; identical to SEQ ID NO: 62404
  misc_feature: 587 for SV(C|O) and mtDNA

SEQ ID NO: 77652 - DNA, 120 bp, Homo sapiens; identical to SEQ ID NO: 62975
  misc_feature: 587 for SV(C|O) and mtDNA

SEQ ID NO: 77653 - DNA, 120 bp, Homo sapiens
  misc_feature: 587 for SV(C|O) and mtDNA
agacctagttcaatgaatctgaggaggctactcagtagacagtcccaccctcacacgattctttacctttcacttcatcttgcccttcattattgcagccctagcagcactccacctcct

SEQ ID NO: 77654 - DNA, 120 bp, Homo sapiens
  misc_feature: 587 for SV(C|O) and mtDNA
aaggctgttgctatagttgcaagcaggaggataatgccgatgtttcaggtttctgagtagagaaatgatccgtaatataggcctcgcccgatgtgtaggaagaggcagataaagaatatt

SEQ ID NO: 77655 - DNA, 120 bp, Homo sapiens
  misc_feature: 586 for SV(C|O) and mtDNA
tttccagtacacttaccatgttacgacttgtctcctctatataaatgcgtaggggttttagttaaatgtcctttgaagtatacttgaggagggtgacgggcggtgtgtacgcgcttcagg

SEQ ID NO: 77656 - DNA, 120 bp, Homo sapiens
  misc_feature: 586 for SV(C|O) and mtDNA
cttaccatgttacgacttgtctcctctatataaatgcgtaggggttttagttaaatgtcctttgaagtatacttgaggagggtgacgggcggtgtgtacgcgcttcagggccctgttcaa

SEQ ID NO: 77657 - DNA, 120 bp, Homo sapiens
  misc_feature: 586 for SV(C|O) and mtDNA
ttctctactcagaaacctgaaacatcggcattatcctcctgcttgcaactatagcaacagccttcataggctatgtcctcccgtgaggccaaatatcattctgaggggccacagtaatta

SEQ ID NO: 77658 - DNA, 120 bp, Homo sapiens
  misc_feature: 586 for SV(C|O) and mtDNA
ttctatctacttcaaattcctccctgtacgaaaggacaagagaaataaggcctacttcacaaagcgccttcccccgtaaatgatatcatctcaacttagtattatacccacacccaccca

SEQ ID NO: 77659 - DNA, 120 bp, Homo sapiens
  misc_feature: 586 for SV(C|O) and mtDNA
ttacataatgggggtatgagttttttttgttagggttaacgagggtggtaaggatggggggaattagggaagtcagggttagggtggttatagtagtgtgcatggttgttacttttattt

SEQ ID NO: 77660 - DNA, 120 bp, Homo sapiens
  misc_feature: 586 for SV(C|O) and mtDNA
tgttacagaaattaagtattgcaacttactgagggctttgaaggctcttggtctgtatttaacctaaatttctataagattattagtataaaaggggagataggtaggagtagcgtggta

SEQ ID NO: 77661 - DNA, 120 bp, Homo sapiens
  misc_feature: 586 for SV(C|O) and mtDNA
gtgtgtggtggccttggtatgtgctttctcgtgttacatcgcgccatcattggtatatggttagtgtgttggttagtaggcctagtatgaggagcgttatggagtggaagtgaaatcaca

SEQ ID NO: 77662 - DNA, 120 bp, Homo sapiens
  misc_feature: 586 for SV(C|O) and mtDNA
tgtaaggagaagatggttaggtctacggaggctccagggtgggagtagttccctgctaagggagggtagactgttcaacctgttcctgctccggcctccactatagcagatgcgagcagg

SEQ ID NO: 77663 - DNA, 120 bp, Homo sapiens; identical to SEQ ID NO: 60375
  misc_feature: 586 for SV(C|O) and mtDNA

SEQ ID NO: 77664 - DNA, 120 bp, Homo sapiens; identical to SEQ ID NO: 56402
  misc_feature: 586 for SV(C|O) and mtDNA

SEQ ID NO: 77665 - DNA, 120 bp, Homo sapiens
  misc_feature: 586 for SV(C|O) and mtDNA
tgatggaggtggagatttggtgctgtgaaattgttttaggtaatagcttttctagtcaggttaggtctaggaggagtaggggcaggttttggctcgtaagaaggcctagataggggattg

SEQ ID NO: 77666 - DNA, 120 bp, Homo sapiens
  misc_feature: 586 for SV(C|O) and mtDNA
tccaaactctaacactatgcttaggcgctatcaccactctgttcgcagcagtctgcgcccttacacaaaatgacatcaaaaaaatcgtagccttctccacttcaagtcaactaggactca

SEQ ID NO: 77667 - DNA, 120 bp, Homo sapiens
  misc_feature: 586 for SV(C|O) and mtDNA
gccccctttcacttctgggtcccagaggttacccaaggcacccctctgacatccggcctgcttcttctcacatgacaaaaactagcccccatctcaatcatataccaaatctctccctca

SEQ ID NO: 77668 - DNA, 120 bp, Homo sapiens
  misc_feature: 586 for SV(C|O) and mtDNA
tgagagaggattatgatgcgactgtgagtgcgttcgtagtttgagtttgctaggcagaatagtaatgaggatgtaagtccgtgggcgattatgagaatgactgcgccggtgaagcttcag

SEQ ID NO: 77669 - DNA, 120 bp, Homo sapiens; identical to SEQ ID NO: 60127
  misc_feature: 586 for SV(C|O) and mtDNA

SEQ ID NO: 77670 - DNA, 120 bp, Homo sapiens
  misc_feature: 586 for SV(C|O) and mtDNA
atagcaacagccttcataggctatgtcctcccgtgaggccaaatatcattctgaggggccacagtaattacaaacttactatccgccatcccatacattgggacagacctagttcaatga

SEQ ID NO: 77671 - DNA, 120 bp, Homo sapiens; identical to SEQ ID NO: 59787
  misc_feature: 586 for SV(C|O) and mtDNA

SEQ ID NO: 77672 - DNA, 120 bp, Homo sapiens
  misc_feature: 586 for SV(C|O) and mtDNA
tacgtgtcgtgtagtacgatgtctagtgatgagtttgctaatacaatgccagtcaggccgcctacggtgaaaagaaagatgaatcctagggctcagagcactgcagcagatcatttcata

SEQ ID NO: 77673 - DNA, 120 bp, Homo sapiens
  misc_feature: 586 for SV(C|O) and mtDNA
tagtgatgagtttgctaatacaatgccagtcaggccgcctacggtgaaaagaaagatgaatcctagggctcagagcactgcagcagatcatttcatattgcttccgtggagtgtggcgag

SEQ ID NO: 77674 - DNA, 120 bp, Homo sapiens
  misc_feature: 586 for SV(C|O) and mtDNA
tagtcctgtatgcccttttcctaacactcacaacaaaactaactaatactaacatctcagacgctcaggaaatagaaaccgtctgaactatcctgcccgccatcatcctagtcctcatcg

SEQ ID NO: 77675 - DNA, 120 bp, Homo sapiens
  misc_feature: 586 for SV(C|O) and mtDNA
tagcctaccccttccttgtactatccctatgaggcataattataacaagctccatctgcctacgacaaacagacctaaaatcgctcattgcatactcttcaatcagccacatagccctcg

SEQ ID NO: 77676 - DNA, 120 bp, Homo sapiens
  misc_feature: 586 for SV(C|O) and mtDNA
tactctccggacaatgaaccataaccaatactaccaatcaatactcatcattaataatcataatggctatagcaataaaactaggaatagccccctttcacttctgggtcccagaggtta

SEQ ID NO: 77677 - DNA, 120 bp, Homo sapiens
  misc_feature: 586 for SV(C|O) and mtDNA
cacttctgggtcccagaggttacccaaggcacccctctgacatccggcctgcttcttctcacatgacaaaaactagcccccatctcaatcatataccaaatctctccctcactaaacgta

SEQ ID NO: 77678 - DNA, 120 bp, Homo sapiens
  misc_feature: 586 for SV(C|O) and mtDNA
taccaatcaatactcatcattaataatcataatggctatagcaataaaactaggaatagccccctttcacttctgggtcccagaggttacccaaggcacccctctgacatccggcctgct

SEQ ID NO: 77679 - DNA, 120 bp, Homo sapiens
  misc_feature: 586 for SV(C|O) and mtDNA
tacatcgcgccatcattggtatatggttagtgtgttggttagtaggcctagtatgaggagcgttatggagtggaagtgaaatcacatggctaggccggaggtcattaggagggctgagag

SEQ ID NO: 77680 - DNA, 120 bp, Homo sapiens
  misc_feature: 586 for SV(C|O) and mtDNA
agatgaagtgaaaggtaaagaatcgtgtgagggtgggactgtctactgagtagcctcctcagattcattgaactaggtctgtcccaatgtatgggatggcggatagtaagtttgtaatta

SEQ ID NO: 77681 - DNA, 120 bp, Homo sapiens
  misc_feature: 586 for SV(C|O) and mtDNA
accaagaccctacttctaacctccctgttcttatgaattcgaacagcatacccccgattccgctacgaccaactcatacacctcctatgaaaaaacttcctaccactcaccctagcatta

SEQ ID NO: 77682 - DNA, 120 bp, Homo sapiens
  misc_feature: 586 for SV(C|O) and mtDNA
ctaggactcataatagttacaatcggcatcaaccaaccacacctagcattcctgcacatctgtacccacgccttcttcaaagccatactatttatgtgctccgggtccatcatccacaac

SEQ ID NO: 77683 - DNA, 120 bp, Homo sapiens
  misc_feature: 586 for SV(C|O) and mtDNA
aatgacattaacactattctcaccagacctcctaggcgacccagacaattataccctagccaaccccttaaacacccctccccacatcaagcccgaatgatatttcctattcgcctacac

SEQ ID NO: 77684 - DNA, 120 bp, Homo sapiens
  misc_feature: 586 for SV(C|O) and mtDNA
gtggtcgggtgtgttattattctgaattttgggggaggttatatgggtttaatagtttttttaatttatttagggggaatgatggttgtctttggatatactacagcgatggctattgag

SEQ ID NO: 77685 - DNA, 120 bp, Homo sapiens
  misc_feature: 586 for SV(C|O) and mtDNA
ggtgtgtggtggccttggtatgtgctttctcgtgttacatcgcgccatcattggtatatggttagtgtgttggttagtaggcctagtatgaggagcgttatggagtggaagtgaaatcac

SEQ ID NO: 77686 - DNA, 120 bp, Homo sapiens
  misc_feature: 586 for SV(C|O) and mtDNA
cccgccatcatcctagtcctcatcgccctcccatccctgcgcatcctttacataacagacgaggtcaacgatccctcccttaccatcaaatcaattggccaccaatggtactgaacctac

SEQ ID NO: 77687 - DNA, 120 bp, Homo sapiens; identical to SEQ ID NO: 61466
  misc_feature: 586 for SV(C|O) and mtDNA

SEQ ID NO: 77688 - DNA, 120 bp, Homo sapiens
  misc_feature: 586 for SV(C|O) and mtDNA
cacacaccacctgtccaaaaaggccttcgatacgggataatcctatttattacctcagaagtttttttcttcgcaggatttttctgagccttttaccactccagcctagcccctaccccc

SEQ ID NO: 77689 - DNA, 120 bp, Homo sapiens
  misc_feature: 586 for SV(C|O) and mtDNA
gggctcagagcactgcagcagatcatttcatattgcttccgtggagtgtggcgagtcagctaaatactttgacgccggtggggatagcgatgattatggtagcggaggtgaaatatgctc

SEQ ID NO: 77690 - DNA, 120 bp, Homo sapiens
  misc_feature: 586 for SV(C|O) and mtDNA
aatcattttccttatctgcttcctagtcctgtatgcccttttcctaacactcacaacaaaactaactaatactaacatctcagacgctcaggaaatagaaaccgtctgaactatcctgcc

SEQ ID NO: 77691 - DNA, 120 bp, Homo sapiens
  misc_feature: 586 for SV(C|O) and mtDNA
ggatgggttcgattctcatagtcctagaaataagggggtttaagctcctattatttactctatcaaagtaactcttttatcagacatatttcttaggtttgagggggaatgctggagatt

SEQ ID NO: 77692 - DNA, 120 bp, Homo sapiens
  misc_feature: 586 for SV(C|O) and mtDNA
ctcaagcactatagttgtagcaggaatcttcttactcatccgcttccaccccctagcagaaaatagcccactaatccaaactctaacactatgcttaggcgctatcaccactctgttcgc

SEQ ID NO: 77693 - DNA, 120 bp, Homo sapiens; identical to SEQ ID NO: 62022
  misc_feature: 586 for SV(C|O) and mtDNA

SEQ ID NO: 77694 - DNA, 120 bp, Homo sapiens
  misc_feature: 586 for SV(C|O) and mtDNA
gcactccacctcctattcttgcacgaaacgggatcaaacaaccccctaggaatcacctcccattccgataaaatcaccttccacccttactacacaatcaaagacgccctcggcttactt

SEQ ID NO: 77695 - DNA, 120 bp, Homo sapiens
  misc_feature: 586 for SV(C|O) and mtDNA
gattctcagggatgggttcgattctcatagtcctagaaataagggggtttaagctcctattatttactctatcaaagtaactcttttatcagacatatttcttaggtttgagggggaatg

SEQ ID NO: 77696 - DNA, 120 bp, Homo sapiens
  misc_feature: 586 for SV(C|O) and mtDNA
actcaaaaccatacctctcacttcaacctccctcaccattggcagcctagcattagcaggaatacctttcctcacaggtttctactccaaagaccacatcatcgaaaccgcaaacatatc

SEQ ID NO: 77697 - DNA, 120 bp, Homo sapiens; identical to SEQ ID NO: 58467
  misc_feature: 586 for SV(C|O) and mtDNA

SEQ ID NO: 77698 - DNA, 120 bp, Homo sapiens; identical to SEQ ID NO: 62572
  misc_feature: 586 for SV(C|O) and mtDNA

SEQ ID NO: 77699 - DNA, 120 bp, Homo sapiens; identical to SEQ ID NO: 59246
  misc_feature: 586 for SV(C|O) and mtDNA

SEQ ID NO: 77700 - DNA, 120 bp, Homo sapiens
  misc_feature: 586 for SV(C|O) and mtDNA
ccgccatcatcctagtcctcatcgccctcccatccctgcgcatcctttacataacagacgaggtcaacgatccctcccttaccatcaaatcaattggccaccaatggtactgaacctacg

SEQ ID NO: 77701 - DNA, 120 bp, Homo sapiens
  misc_feature: 586 for SV(C|O) and mtDNA
cgcccctcttcgtctgatccgtcctaatcacagcagtcctacttctcctatctctcccagtcctagctgctggcatcactatactactaacagaccgcaacctcaacaccaccttcttcg

SEQ ID NO: 77702 - DNA, 120 bp, Homo sapiens
  misc_feature: 586 for SV(C|O) and mtDNA
ccccctctacctaaaactcacagccctcgctgtcactttcctaggacttctaacagccctagacctcaactacctaaccaacaaacttaaaataaaatccccactatgcacattttattt

SEQ ID NO: 77703 - DNA, 120 bp, Homo sapiens
  misc_feature: 586 for SV(C|O) and mtDNA
acagagagttctcccagtaggttaatagtggggggtaaggcgaggttagcgaggcttgctagaagtcatcaaaaagctattagtgggagtagagtttgaagtccttgagagaggattatg

SEQ ID NO: 77704 - DNA, 120 bp, Homo sapiens; identical to SEQ ID NO: 60427
  misc_feature: 586 for SV(C|O) and mtDNA

SEQ ID NO: 77705 - DNA, 120 bp, Homo sapiens
  misc_feature: 586 for SV(C|O) and mtDNA
aaacatcctatcatctgtaggctcattcatttctctaacagcagtaatattaataattttcatgatttgagaagccttcgcttcgaagcgaaaagtcctaatagtagaagaaccctccat

SEQ ID NO: 77706 - DNA, 120 bp, Homo sapiens; identical to SEQ ID NO: 60586
  misc_feature: 586 for SV(C|O) and mtDNA

SEQ ID NO: 77707 - DNA, 120 bp, Homo sapiens
  misc_feature: 586 for SV(C|O) and mtDNA
agggctcagagcactgcagcagatcatttcatattgcttccgtggagtgtggcgagtcagctaaatactttgacgccggtggggatagcgatgattatggtagcggaggtgaaatatgct

SEQ ID NO: 77708 - DNA, 120 bp, Homo sapiens
  misc_feature: 585 for SV(C|O) and mtDNA
ttttacataatgggggtatgagttttttttgttagggttaacgagggtggtaaggatggggggaattagggaagtcagggttagggtggttatagtagtgtgcatggttgttacttttat

SEQ ID NO: 77709 - DNA, 120 bp, Homo sapiens; identical to SEQ ID NO: 61315
  misc_feature: 585 for SV(C|O) and mtDNA

SEQ ID NO: 77710 - DNA, 120 bp, Homo sapiens
  misc_feature: 585 for SV(C|O) and mtDNA
cgtctttgattgtgtagtaagggtggaaggtgattttatcggaatgggaggtgattcctagggggttgtttgatcccgtttcgtgcaagaataggaggtggagtgctgctagggctgcaa

SEQ ID NO: 77711 - DNA, 120 bp, Homo sapiens
  misc_feature: 585 for SV(C|O) and mtDNA
ttgagagaggattatgatgcgactgtgagtgcgttcgtagtttgagtttgctaggcagaatagtaatgaggatgtaagtccgtgggcgattatgagaatgactgcgccggtgaagcttca

SEQ ID NO: 77712 - DNA, 120 bp, Homo sapiens; identical to SEQ ID NO: 54108
  misc_feature: 585 for SV(C|O) and mtDNA

SEQ ID NO: 77713 - DNA, 120 bp, Homo sapiens
  misc_feature: 585 for SV(C|O) and mtDNA
ttccttctctccttaatgacattaacactattctcaccagacctcctaggcgacccagacaattataccctagccaaccccttaaacacccctccccacatcaagcccgaatgatatttc

SEQ ID NO: 77714 - DNA, 120 bp, Homo sapiens
  misc_feature: 585 for SV(C|O) and mtDNA
ttaccccccactattaacctactgggagaactctctgtgctagtaaccacgttctcctgatcaaatatcactctcctacttacaggactcaacatactagtcacagccctatactccctc

SEQ ID NO: 77715 - DNA, 120 bp, Homo sapiens; identical to SEQ ID NO: 61362
  misc_feature: 585 for SV(C|O) and mtDNA

SEQ ID NO: 77716 - DNA, 120 bp, Homo sapiens
  misc_feature: 585 for SV(C|O) and mtDNA
tgtagtaagggtggaaggtgattttatcggaatgggaggtgattcctagggggttgtttgatcccgtttcgtgcaagaataggaggtggagtgctgctagggctgcaataatgaagggca

SEQ ID NO: 77717 - DNA, 120 bp, Homo sapiens
  misc_feature: 585 for SV(C|O) and mtDNA
tggtcgggtgtgttattattctgaattttgggggaggttatatgggtttaatagtttttttaatttatttagggggaatgatggttgtctttggatatactacagcgatggctattgagg

SEQ ID NO: 77718 - DNA, 120 bp, Homo sapiens
  misc_feature: 585 for SV(C|O) and mtDNA
tgggctattttctgctagggggtggaagcggatgagtaagaagattcctgctacaactatagtgcttgagtggagtagggctgagactggggtggggccttctatggctgaggggagtca

SEQ ID NO: 77719 - DNA, 120 bp, Homo sapiens
  misc_feature: 585 for SV(C|O) and mtDNA
aatcacatgcctatcatatagtaaaacccagcccatgacccctaacaggggccctctcagccctcctaatgacctccggcctagccatgtgatttcacttccactccataacgctcctca

SEQ ID NO: 77720 - DNA, 120 bp, Homo sapiens
  misc_feature: 585 for SV(C|O) and mtDNA
tcgtagtaacagccattctcatccaaaccccctgaagcttcaccggcgcagtcattctcataatcgcccacggacttacatcctcattactattctgcctagcaaactcaaactacgaac

SEQ ID NO: 77721 - DNA, 120 bp, Homo sapiens
  misc_feature: 585 for SV(C|O) and mtDNA
tccccctctacctaaaactcacagccctcgctgtcactttcctaggacttctaacagccctagacctcaactacctaaccaacaaacttaaaataaaatccccactatgcacattttatt

SEQ ID NO: 77722 - DNA, 120 bp, Homo sapiens; identical to SEQ ID NO: 59785
  misc_feature: 585 for SV(C|O) and mtDNA

SEQ ID NO: 77723 - DNA, 120 bp, Homo sapiens
  misc_feature: 585 for SV(C|O) and mtDNA
tcaccctccttaacctctacttctacctacgcctaatctactccacctcaatcacactactccccatatctaacaacgtaaaaataaaatgacagtttgaacatacaaaacccaccccat

SEQ ID NO: 77724 - DNA, 120 bp, Homo sapiens; identical to SEQ ID NO: 57964
  misc_feature: 585 for SV(C|O) and mtDNA

SEQ ID NO: 77725 - DNA, 120 bp, Homo sapiens
  misc_feature: 585 for SV(C|O) and mtDNA
catatgagattgtttgggctactgctcgcagtgcgccgatcagggcgtagtttgagtttgatgctcaccctgatcagaggattgagtaaacggctaggctagaggtggctagaataaata

SEQ ID NO: 77726 - DNA, 120 bp, Homo sapiens; identical to SEQ ID NO: 61594
  misc_feature: 585 for SV(C|O) and mtDNA

SEQ ID NO: 77727 - DNA, 120 bp, Homo sapiens
  misc_feature: 585 for SV(C|O) and mtDNA
cttaatgacattaacactattctcaccagacctcctaggcgacccagacaattataccctagccaaccccttaaacacccctccccacatcaagcccgaatgatatttcctattcgccta

SEQ ID NO: 77728 - DNA, 120 bp, Homo sapiens; identical to SEQ ID NO: 62590
  misc_feature: 585 for SV(C|O) and mtDNA

SEQ ID NO: 77729 - DNA, 120 bp, Homo sapiens
  misc_feature: 585 for SV(C|O) and mtDNA
tactcaaaaccatacctctcacttcaacctccctcaccattggcagcctagcattagcaggaatacctttcctcacaggtttctactccaaagaccacatcatcgaaaccgcaaacatat

SEQ ID NO: 77730 - DNA, 120 bp, Homo sapiens
  misc_feature: 585 for SV(C|O) and mtDNA
agaagtcatcaaaaagctattagtgggagtagagtttgaagtccttgagagaggattatgatgcgactgtgagtgcgttcgtagtttgagtttgctaggcagaatagtaatgaggatgta

SEQ ID NO: 77731 - DNA, 120 bp, Homo sapiens
  misc_feature: 585 for SV(C|O) and mtDNA
gttctcccagtaggttaatagtggggggtaaggcgaggttagcgaggcttgctagaagtcatcaaaaagctattagtgggagtagagtttgaagtccttgagagaggattatgatgcgac

SEQ ID NO: 77732 - DNA, 120 bp, Homo sapiens
  misc_feature: 585 for SV(C|O) and mtDNA
gttaatagtggggggtaaggcgaggttagcgaggcttgctagaagtcatcaaaaagctattagtgggagtagagtttgaagtccttgagagaggattatgatgcgactgtgagtgcgttc

SEQ ID NO: 77733 - DNA, 120 bp, Homo sapiens
  misc_feature: 585 for SV(C|O) and mtDNA
cctagaaccaggcgacctgcgactccttgacgttgacaatcgagtagtactcccgattgaagcccccattcgtataataattacatcacaagacgtcttgcactcatgagctgtccccac

SEQ ID NO: 77734 - DNA, 120 bp, Homo sapiens; identical to SEQ ID NO: 58776
  misc_feature: 585 for SV(C|O) and mtDNA

SEQ ID NO: 77735 - DNA, 120 bp, Homo sapiens; identical to SEQ ID NO: 59524
  misc_feature: 585 for SV(C|O) and mtDNA

SEQ ID NO: 77736 - DNA, 120 bp, Homo sapiens
  misc_feature: 585 for SV(C|O) and mtDNA
cccctcttcgtctgatccgtcctaatcacagcagtcctacttctcctatctctcccagtcctagctgctggcatcactatactactaacagaccgcaacctcaacaccaccttcttcgac

SEQ ID NO: 77737 - DNA, 120 bp, Homo sapiens
  misc_feature: 585 for SV(C|O) and mtDNA
ctcgccttaccccccactattaacctactgggagaactctctgtgctagtaaccacgttctcctgatcaaatatcactctcctacttacaggactcaacatactagtcacagccctatac

SEQ ID NO: 77738 - DNA, 120 bp, Homo sapiens
  misc_feature: 585 for SV(C|O) and mtDNA
ggtggcaagaaatgggctacattttctaccccagaaaactacgatagcccttatgaaacttaagggtcgaaggtggatttagcagtaaactgagagtagagtgcttagttgaacagggcc

SEQ ID NO: 77739 - DNA, 120 bp, Homo sapiens; identical to SEQ ID NO: 57766
  misc_feature: 585 for SV(C|O) and mtDNA

SEQ ID NO: 77740 - DNA, 120 bp, Homo sapiens
  misc_feature: 585 for SV(C|O) and mtDNA
ctccttaatgacattaacactattctcaccagacctcctaggcgacccagacaattataccctagccaaccccttaaacacccctccccacatcaagcccgaatgatatttcctattcgc

SEQ ID NO: 77741 - DNA, 120 bp, Homo sapiens
  misc_feature: 585 for SV(C|O) and mtDNA
gccatacggtagtatttagttggggcatttcactgtaaagaggtgttggttctcttaatctttaacttaaaaggttaatgctaagttagctttacagtgggctctagagggggtagaggg

SEQ ID NO: 77742 - DNA, 120 bp, Homo sapiens
  misc_feature: 585 for SV(C|O) and mtDNA
agagttctcccagtaggttaatagtggggggtaaggcgaggttagcgaggcttgctagaagtcatcaaaaagctattagtgggagtagagtttgaagtccttgagagaggattatgatgc

SEQ ID NO: 77743 - DNA, 120 bp, Homo sapiens
  misc_feature: 585 for SV(C|O) and mtDNA
gagtggtaggaagttttttcataggaggtgtatgagttggtcgtagcggaatcgggggtatgctgttcgaattcataagaacagggaggttagaagtagggtcttggtgacaaaatatgt

SEQ ID NO: 77744 - DNA, 120 bp, Homo sapiens
  misc_feature: 585 for SV(C|O) and mtDNA
atccaaactctaacactatgcttaggcgctatcaccactctgttcgcagcagtctgcgcccttacacaaaatgacatcaaaaaaatcgtagccttctccacttcaagtcaactaggactc

SEQ ID NO: 77745 - DNA, 120 bp, Homo sapiens
  misc_feature: 585 for SV(C|O) and mtDNA
cgccttaccccccactattaacctactgggagaactctctgtgctagtaaccacgttctcctgatcaaatatcactctcctacttacaggactcaacatactagtcacagccctatactc

SEQ ID NO: 77746 - DNA, 120 bp, Homo sapiens
  misc_feature: 585 for SV(C|O) and mtDNA
cactttccagtacacttaccatgttacgacttgtctcctctatataaatgcgtaggggttttagttaaatgtcctttgaagtatacttgaggagggtgacgggcggtgtgtacgcgcttc

SEQ ID NO: 77747 - DNA, 120 bp, Homo sapiens
  misc_feature: 585 for SV(C|O) and mtDNA
aatatactctccggacaatgaaccataaccaatactaccaatcaatactcatcattaataatcataatggctatagcaataaaactaggaatagccccctttcacttctgggtcccagag

SEQ ID NO: 77748 - DNA, 120 bp, Homo sapiens
  misc_feature: 585 for SV(C|O) and mtDNA
cctagcagcactccacctcctattcttgcacgaaacgggatcaaacaaccccctaggaatcacctcccattccgataaaatcaccttccacccttactacacaatcaaagacgccctcgg

SEQ ID NO: 77749 - DNA, 120 bp, Homo sapiens
  misc_feature: 585 for SV(C|O) and mtDNA
ccaaactctaacactatgcttaggcgctatcaccactctgttcgcagcagtctgcgcccttacacaaaatgacatcaaaaaaatcgtagccttctccacttcaagtcaactaggactcat

SEQ ID NO: 77750 - DNA, 120 bp, Homo sapiens
  misc_feature: 585 for SV(C|O) and mtDNA
caccaagaccctacttctaacctccctgttcttatgaattcgaacagcatacccccgattccgctacgaccaactcatacacctcctatgaaaaaacttcctaccactcaccctagcatt

SEQ ID NO: 77751 - DNA, 120 bp, Homo sapiens
  misc_feature: 585 for SV(C|O) and mtDNA
agttggggcatttcactgtaaagaggtgttggttctcttaatctttaacttaaaaggttaatgctaagttagctttacagtgggctctagagggggtagagggggtgctatagggtaaat

SEQ ID NO: 77752 - DNA, 120 bp, Homo sapiens
  misc_feature: 585 for SV(C|O) and mtDNA
attatcctcctgcttgcaactatagcaacagccttcataggctatgtcctcccgtgaggccaaatatcattctgaggggccacagtaattacaaacttactatccgccatcccatacatt

SEQ ID NO: 77753 - DNA, 120 bp, Homo sapiens
  misc_feature: 585 for SV(C|O) and mtDNA
actcaacatactagtcacagccctatactccctctacatatttaccacaacacaatggggctcactcacccaccacattaacaacataaaaccctcattcacacgagaaaacaccctcat

SEQ ID NO: 77754 - DNA, 120 bp, Homo sapiens
  misc_feature: 585 for SV(C|O) and mtDNA
atccccctctacctaaaactcacagccctcgctgtcactttcctaggacttctaacagccctagacctcaactacctaaccaacaaacttaaaataaaatccccactatgcacattttat

SEQ ID NO: 77755 - DNA, 120 bp, Homo sapiens; identical to SEQ ID NO: 59625
  misc_feature: 585 for SV(C|O) and mtDNA

SEQ ID NO: 77756 - DNA, 120 bp, Homo sapiens
  misc_feature: 585 for SV(C|O) and mtDNA
agtttatattcttatcctaccaggcttcggaataatctcccatattgtaacttactactccggaaaaaaagaaccatttggatacataggtatggtctgagctatgatatcaattggctt

SEQ ID NO: 77757 - DNA, 120 bp, Homo sapiens
  misc_feature: 585 for SV(C|O) and mtDNA
aactacgaacgcactcacagtcgcatcataatcctctctcaaggacttcaaactctactcccactaatagctttttgatgacttctagcaagcctcgctaacctcgccttaccccccact

SEQ ID NO: 77758 - DNA, 120 bp, Homo sapiens; identical to SEQ ID NO: 60994
  misc_feature: 585 for SV(C|O) and mtDNA

SEQ ID NO: 77759 - DNA, 120 bp, Homo sapiens
  misc_feature: 585 for SV(C|O) and mtDNA
aggttaatagtggggggtaaggcgaggttagcgaggcttgctagaagtcatcaaaaagctattagtgggagtagagtttgaagtccttgagagaggattatgatgcgactgtgagtgcgt

SEQ ID NO: 77760 - DNA, 120 bp, Homo sapiens; identical to SEQ ID NO: 61195
  misc_feature: 584 for SV(C|O) and mtDNA

SEQ ID NO: 77761 - DNA, 120 bp, Homo sapiens; identical to SEQ ID NO: 59311
  misc_feature: 584 for SV(C|O) and mtDNA

SEQ ID NO: 77762 - DNA, 120 bp, Homo sapiens; identical to SEQ ID NO: 61164
  misc_feature: 584 for SV(C|O) and mtDNA

SEQ ID NO: 77763 - DNA, 120 bp, Homo sapiens
  misc_feature: 584 for SV(C|O) and mtDNA
ttacatcgcgccatcattggtatatggttagtgtgttggttagtaggcctagtatgaggagcgttatggagtggaagtgaaatcacatggctaggccggaggtcattaggagggctgaga

SEQ ID NO: 77764 - DNA, 120 bp, Homo sapiens; identical to SEQ ID NO: 62327
  misc_feature: 584 for SV(C|O) and mtDNA

SEQ ID NO: 77765 - DNA, 120 bp, Homo sapiens
  misc_feature: 584 for SV(C|O) and mtDNA
atgtctaacaacatggctttctcaacttttaaaggataacagctatccattggtcttaggccccaaaaattttggtgcaactccaaataaaagtaacaaccatgcacactactataacca

SEQ ID NO: 77766 - DNA, 120 bp, Homo sapiens
  misc_feature: 584 for SV(C|O) and mtDNA
tgggacagacctagttcaatgaatctgaggaggctactcagtagacagtcccaccctcacacgattctttacctttcacttcatcttgcccttcattattgcagccctagcagcactcca

SEQ ID NO: 77767 - DNA, 120 bp, Homo sapiens
  misc_feature: 584 for SV(C|O) and mtDNA
cctagtatgaggagcgttatggagtggaagtgaaatcacatggctaggccggaggtcattaggagggctgagagggcccctgttaggggtcatgggctgggttttactatatgataggca

SEQ ID NO: 77768 - DNA, 120 bp, Homo sapiens; identical to SEQ ID NO: 62561
  misc_feature: 584 for SV(C|O) and mtDNA

SEQ ID NO: 77769 - DNA, 120 bp, Homo sapiens; identical to SEQ ID NO: 62562
  misc_feature: 584 for SV(C|O) and mtDNA

SEQ ID NO: 77770 - DNA, 120 bp, Homo sapiens
  misc_feature: 584 for SV(C|O) and mtDNA
gatgttcgccgaccgttgactattctctacaaaccacaaagacattggaacactatacctattattcggcgcatgagctggagtcctaggcacagctctaagcctccttattcgagccga

SEQ ID NO: 77771 - DNA, 120 bp, Homo sapiens
  misc_feature: 584 for SV(C|O) and mtDNA
tcctactcctgctcgcatctgctatagtggaggccggagcaggaacaggttgaacagtctaccctcccttagcagggaactactcccaccctggagcctccgtagacctaaccatcttct

SEQ ID NO: 77772 - DNA, 120 bp, Homo sapiens
  misc_feature: 584 for SV(C|O) and mtDNA
agagtatgatggggtggtggttgtggtaaactttaatagtgtaggaagctgaataatttatgaaggagaggggtcagggttgattcgggaggatcctattggtgcgggggctttgtatga

SEQ ID NO: 77773 - DNA, 120 bp, Homo sapiens
  misc_feature: 584 for SV(C|O) and mtDNA
gcccatgaggtggcaagaaatgggctacattttctaccccagaaaactacgatagcccttatgaaacttaagggtcgaaggtggatttagcagtaaactgagagtagagtgcttagttga

SEQ ID NO: 77774 - DNA, 120 bp, Homo sapiens
  misc_feature: 584 for SV(C|O) and mtDNA
ctactcaaaaccatacctctcacttcaacctccctcaccattggcagcctagcattagcaggaatacctttcctcacaggtttctactccaaagaccacatcatcgaaaccgcaaacata

SEQ ID NO: 77775 - DNA, 120 bp, Homo sapiens; identical to SEQ ID NO: 56667
  misc_feature: 584 for SV(C|O) and mtDNA

SEQ ID NO: 77776 - DNA, 120 bp, Homo sapiens
  misc_feature: 584 for SV(C|O) and mtDNA
gatggatcacaggtctatcaccctattaaccactcacgggagctctccatgcatttggtattttcgtctggggggtgtgcacgcgatagcattgcgagacgctggagccggagcacccta

SEQ ID NO: 77777 - DNA, 120 bp, Homo sapiens; identical to SEQ ID NO: 54202
  misc_feature: 584 for SV(C|O) and mtDNA

SEQ ID NO: 77778 - DNA, 120 bp, Homo sapiens
  misc_feature: 584 for SV(C|O) and mtDNA
ggggcaatgaatgaagcgaacagattttcgttcattttggttctcagggtttgttataattttttatttttatgggctttggtgagggaggtaggtggtagtttgtgtttaatattttta

SEQ ID NO: 77779 - DNA, 120 bp, Homo sapiens; identical to SEQ ID NO: 56124
  misc_feature: 584 for SV(C|O) and mtDNA

SEQ ID NO: 77780 - DNA, 120 bp, Homo sapiens
  misc_feature: 584 for SV(C|O) and mtDNA
aaaaaaaactcatacccccattatgtaaaatccattgtcgcatccacctttattatcagtctcttccccacaacaatattcatgtgcctagaccaagaagttattatctcgaactgacac

SEQ ID NO: 77781 - DNA, 120 bp, Homo sapiens; identical to SEQ ID NO: 61912
  misc_feature: 584 for SV(C|O) and mtDNA

SEQ ID NO: 77782 - DNA, 120 bp, Homo sapiens
  misc_feature: 584 for SV(C|O) and mtDNA
gtagtatttagttggggcatttcactgtaaagaggtgttggttctcttaatctttaacttaaaaggttaatgctaagttagctttacagtgggctctagagggggtagagggggtgctat

SEQ ID NO: 77783 - DNA, 120 bp, Homo sapiens
  misc_feature: 584 for SV(C|O) and mtDNA
ggacagacctagttcaatgaatctgaggaggctactcagtagacagtcccaccctcacacgattctttacctttcacttcatcttgcccttcattattgcagccctagcagcactccacc

SEQ ID NO: 77784 - DNA, 120 bp, Homo sapiens
  misc_feature: 584 for SV(C|O) and mtDNA
cccatacattgggacagacctagttcaatgaatctgaggaggctactcagtagacagtcccaccctcacacgattctttacctttcacttcatcttgcccttcattattgcagccctagc

SEQ ID NO: 77785 - DNA, 120 bp, Homo sapiens; identical to SEQ ID NO: 55952
  misc_feature: 584 for SV(C|O) and mtDNA

SEQ ID NO: 77786 - DNA, 120 bp, Homo sapiens
  misc_feature: 584 for SV(C|O) and mtDNA
gacccagacaattataccctagccaaccccttaaacacccctccccacatcaagcccgaatgatatttcctattcgcctacacaattctccgatccgtccctaacaaactaggaggcgtc

SEQ ID NO: 77787 - DNA, 120 bp, Homo sapiens
  misc_feature: 584 for SV(C|O) and mtDNA
gaccctacttctaacctccctgttcttatgaattcgaacagcatacccccgattccgctacgaccaactcatacacctcctatgaaaaaacttcctaccactcaccctagcattacttat

SEQ ID NO: 77788 - DNA, 120 bp, Homo sapiens
  misc_feature: 584 for SV(C|O) and mtDNA
acgcccctcttcgtctgatccgtcctaatcacagcagtcctacttctcctatctctcccagtcctagctgctggcatcactatactactaacagaccgcaacctcaacaccaccttcttc

SEQ ID NO: 77789 - DNA, 120 bp, Homo sapiens
  misc_feature: 584 for SV(C|O) and mtDNA
cacttaccatgttacgacttgtctcctctatataaatgcgtaggggttttagttaaatgtcctttgaagtatacttgaggagggtgacgggcggtgtgtacgcgcttcagggccctgttc

SEQ ID NO: 77790 - DNA, 120 bp, Homo sapiens
  misc_feature: 584 for SV(C|O) and mtDNA
ccttccttgtactatccctatgaggcataattataacaagctccatctgcctacgacaaacagacctaaaatcgctcattgcatactcttcaatcagccacatagccctcgtagtaacag

SEQ ID NO: 77791 - DNA, 120 bp, Homo sapiens
  misc_feature: 584 for SV(C|O) and mtDNA
ccgccatcccatacattgggacagacctagttcaatgaatctgaggaggctactcagtagacagtcccaccctcacacgattctttacctttcacttcatcttgcccttcattattgcag

SEQ ID NO: 77792 - DNA, 120 bp, Homo sapiens
  misc_feature: 584 for SV(C|O) and mtDNA
ctcacacctcatatcctccctactatgcctagaaggaataatactatcactgttcattatagctactctcataaccctcaacacccactccctcttagccaatattgtgcctattgccat

SEQ ID NO: 77793 - DNA, 120 bp, Homo sapiens
  misc_feature: 584 for SV(C|O) and mtDNA
cacagcttaaaactcaaaggacctggcggtgcttcatatccctctagaggagcctgttctgtaatcgataaaccccgatcaacctcaccacctcttgctcagcctatataccgccatctt

SEQ ID NO: 77794 - DNA, 120 bp, Homo sapiens; identical to SEQ ID NO: 61918
  misc_feature: 584 for SV(C|O) and mtDNA

SEQ ID NO: 77795 - DNA, 120 bp, Homo sapiens
  misc_feature: 584 for SV(C|O) and mtDNA
actatccgccatcccatacattgggacagacctagttcaatgaatctgaggaggctactcagtagacagtcccaccctcacacgattctttacctttcacttcatcttgcccttcattat

SEQ ID NO: 77796 - DNA, 120 bp, Homo sapiens; identical to SEQ ID NO: 62088
  misc_feature: 584 for SV(C|O) and mtDNA

SEQ ID NO: 77797 - DNA, 120 bp, Homo sapiens
  misc_feature: 584 for SV(C|O) and mtDNA
actagaaaagctattacctaaaacaatttcacagcaccaaatctccacctccatcatcacctcaacccaaaaaggcataattaaactttacttcctctctttcttcttcccactcatcct

SEQ ID NO: 77798 - DNA, 120 bp, Homo sapiens
  misc_feature: 583 for SV(C|O) and mtDNA
tttctatctacttcaaattcctccctgtacgaaaggacaagagaaataaggcctacttcacaaagcgccttcccccgtaaatgatatcatctcaacttagtattatacccacacccaccc

SEQ ID NO: 77799 - DNA, 120 bp, Homo sapiens; identical to SEQ ID NO: 61942
  misc_feature: 583 for SV(C|O) and mtDNA

SEQ ID NO: 77800 - DNA, 120 bp, Homo sapiens; identical to SEQ ID NO: 55456
  misc_feature: 583 for SV(C|O) and mtDNA

SEQ ID NO: 77801 - DNA, 120 bp, Homo sapiens
  misc_feature: 583 for SV(C|O) and mtDNA
taatgacattaacactattctcaccagacctcctaggcgacccagacaattataccctagccaaccccttaaacacccctccccacatcaagcccgaatgatatttcctattcgcctaca

SEQ ID NO: 77802 - DNA, 120 bp, Homo sapiens; identical to SEQ ID NO: 55828
  misc_feature: 583 for SV(C|O) and mtDNA

SEQ ID NO: 77803 - DNA, 120 bp, Homo sapiens
  misc_feature: 583 for SV(C|O) and mtDNA
gactcaacatactagtcacagccctatactccctctacatatttaccacaacacaatggggctcactcacccaccacattaacaacataaaaccctcattcacacgagaaaacaccctca

SEQ ID NO: 77804 - DNA, 120 bp, Homo sapiens
  misc_feature: 583 for SV(C|O) and mtDNA
cgccatcatcctagtcctcatcgccctcccatccctgcgcatcctttacataacagacgaggtcaacgatccctcccttaccatcaaatcaattggccaccaatggtactgaacctacga

SEQ ID NO: 77805 - DNA, 120 bp, Homo sapiens
  misc_feature: 583 for SV(C|O) and mtDNA
tcgccgaccgttgactattctctacaaaccacaaagacattggaacactatacctattattcggcgcatgagctggagtcctaggcacagctctaagcctccttattcgagccgagctgg

SEQ ID NO: 77806 - DNA, 120 bp, Homo sapiens; identical to SEQ ID NO: 58654
  misc_feature: 583 for SV(C|O) and mtDNA

SEQ ID NO: 77807 - DNA, 120 bp, Homo sapiens
  misc_feature: 583 for SV(C|O) and mtDNA
cggcattatcctcctgcttgcaactatagcaacagccttcataggctatgtcctcccgtgaggccaaatatcattctgaggggccacagtaattacaaacttactatccgccatcccata

SEQ ID NO: 77808 - DNA, 120 bp, Homo sapiens
  misc_feature: 583 for SV(C|O) and mtDNA
cctcgccttaccccccactattaacctactgggagaactctctgtgctagtaaccacgttctcctgatcaaatatcactctcctacttacaggactcaacatactagtcacagccctata

SEQ ID NO: 77809 - DNA, 120 bp, Homo sapiens; identical to SEQ ID NO: 62182
  misc_feature: 583 for SV(C|O) and mtDNA

SEQ ID NO: 77810 - DNA, 120 bp, Homo sapiens
  misc_feature: 583 for SV(C|O) and mtDNA
ctagaaaagctattacctaaaacaatttcacagcaccaaatctccacctccatcatcacctcaacccaaaaaggcataattaaactttacttcctctctttcttcttcccactcatccta

SEQ ID NO: 77811 - DNA, 120 bp, Homo sapiens; identical to SEQ ID NO: 59817
  misc_feature: 583 for SV(C|O) and mtDNA

SEQ ID NO: 77812 - DNA, 120 bp, Homo sapiens
  misc_feature: 583 for SV(C|O) and mtDNA
ggtagtatttagttggggcatttcactgtaaagaggtgttggttctcttaatctttaacttaaaaggttaatgctaagttagctttacagtgggctctagagggggtagagggggtgcta

SEQ ID NO: 77813 - DNA, 120 bp, Homo sapiens; identical to SEQ ID NO: 62352
  misc_feature: 583 for SV(C|O) and mtDNA

SEQ ID NO: 77814 - DNA, 120 bp, Homo sapiens
  misc_feature: 583 for SV(C|O) and mtDNA
tagaagtcatcaaaaagctattagtgggagtagagtttgaagtccttgagagaggattatgatgcgactgtgagtgcgttcgtagtttgagtttgctaggcagaatagtaatgaggatgt

SEQ ID NO: 77815 - DNA, 120 bp, Homo sapiens
  misc_feature: 583 for SV(C|O) and mtDNA
cgggtgtgttattattctgaattttgggggaggttatatgggtttaatagtttttttaatttatttagggggaatgatggttgtctttggatatactacagcgatggctattgaggagta

SEQ ID NO: 77816 - DNA, 120 bp, Homo sapiens
  misc_feature: 583 for SV(C|O) and mtDNA
taagctacccttttaccatcattggacaagtagcatccgtactatacttcacaacaatcctaatcctaataccaactatctccctaattgaaaacaaaatactcaaatgggcctgtcctt

SEQ ID NO: 77817 - DNA, 120 bp, Homo sapiens
  misc_feature: 583 for SV(C|O) and mtDNA
cgtgcacaccccccagacgaaaataccaaatgcatggagagctcccgtgagtggttaatagggtgatagacctgtgatccatcgtgatgtcttatttaaggggaacgtgtgggctattta

SEQ ID NO: 77818 - DNA, 120 bp, Homo sapiens; identical to SEQ ID NO: 62503
  misc_feature: 583 for SV(C|O) and mtDNA

SEQ ID NO: 77819 - DNA, 120 bp, Homo sapiens
  misc_feature: 583 for SV(C|O) and mtDNA
gtctagtgatgagtttgctaatacaatgccagtcaggccgcctacggtgaaaagaaagatgaatcctagggctcagagcactgcagcagatcatttcatattgcttccgtggagtgtggc

SEQ ID NO: 77820 - DNA, 120 bp, Homo sapiens; identical to SEQ ID NO: 61303
  misc_feature: 583 for SV(C|O) and mtDNA

SEQ ID NO: 77821 - DNA, 120 bp, Homo sapiens
  misc_feature: 583 for SV(C|O) and mtDNA
cacatgaaacatcctatcatctgtaggctcattcatttctctaacagcagtaatattaataattttcatgatttgagaagccttcgcttcgaagcgaaaagtcctaatagtagaagaacc

SEQ ID NO: 77822 - DNA, 120 bp, Homo sapiens; identical to SEQ ID NO: 62149
  misc_feature: 583 for SV(C|O) and mtDNA

SEQ ID NO: 77823 - DNA, 120 bp, Homo sapiens
  misc_feature: 583 for SV(C|O) and mtDNA
ggttaatagtggggggtaaggcgaggttagcgaggcttgctagaagtcatcaaaaagctattagtgggagtagagtttgaagtccttgagagaggattatgatgcgactgtgagtgcgtt

SEQ ID NO: 77824 - DNA, 120 bp, Homo sapiens
  misc_feature: 583 for SV(C|O) and mtDNA
atcattttccttatctgcttcctagtcctgtatgcccttttcctaacactcacaacaaaactaactaatactaacatctcagacgctcaggaaatagaaaccgtctgaactatcctgccc

SEQ ID NO: 77825 - DNA, 120 bp, Homo sapiens
  misc_feature: 583 for SV(C|O) and mtDNA
ccgaccgttgactattctctacaaaccacaaagacattggaacactatacctattattcggcgcatgagctggagtcctaggcacagctctaagcctccttattcgagccgagctgggcc

SEQ ID NO: 77826 - DNA, 120 bp, Homo sapiens; identical to SEQ ID NO: 58152
  misc_feature: 583 for SV(C|O) and mtDNA

SEQ ID NO: 77827 - DNA, 120 bp, Homo sapiens
  misc_feature: 583 for SV(C|O) and mtDNA
gccgaccgttgactattctctacaaaccacaaagacattggaacactatacctattattcggcgcatgagctggagtcctaggcacagctctaagcctccttattcgagccgagctgggc

SEQ ID NO: 77828 - DNA, 120 bp, Homo sapiens
  misc_feature: 583 for SV(C|O) and mtDNA
ctaccaatcaatactcatcattaataatcataatggctatagcaataaaactaggaatagccccctttcacttctgggtcccagaggttacccaaggcacccctctgacatccggcctgc

SEQ ID NO: 77829 - DNA, 120 bp, Homo sapiens
  misc_feature: 583 for SV(C|O) and mtDNA
gatggaggtggagatttggtgctgtgaaattgttttaggtaatagcttttctagtcaggttaggtctaggaggagtaggggcaggttttggctcgtaagaaggcctagataggggattgt

SEQ ID NO: 77830 - DNA, 120 bp, Homo sapiens
  misc_feature: 583 for SV(C|O) and mtDNA
gagttctcccagtaggttaatagtggggggtaaggcgaggttagcgaggcttgctagaagtcatcaaaaagctattagtgggagtagagtttgaagtccttgagagaggattatgatgcg

SEQ ID NO: 77831 - DNA, 120 bp, Homo sapiens
  misc_feature: 583 for SV(C|O) and mtDNA
gaggacaaccagtaagctacccttttaccatcattggacaagtagcatccgtactatacttcacaacaatcctaatcctaataccaactatctccctaattgaaaacaaaatactcaaat

SEQ ID NO: 77832 - DNA, 120 bp, Homo sapiens
  misc_feature: 583 for SV(C|O) and mtDNA
ccaatcaatactcatcattaataatcataatggctatagcaataaaactaggaatagccccctttcacttctgggtcccagaggttacccaaggcacccctctgacatccggcctgcttc

SEQ ID NO: 77833 - DNA, 120 bp, Homo sapiens
  misc_feature: 583 for SV(C|O) and mtDNA
acagcttaaaactcaaaggacctggcggtgcttcatatccctctagaggagcctgttctgtaatcgataaaccccgatcaacctcaccacctcttgctcagcctatataccgccatcttc

SEQ ID NO: 77834 - DNA, 120 bp, Homo sapiens
  misc_feature: 583 for SV(C|O) and mtDNA
cactcaagcactatagttgtagcaggaatcttcttactcatccgcttccaccccctagcagaaaatagcccactaatccaaactctaacactatgcttaggcgctatcaccactctgttc

SEQ ID NO: 77835 - DNA, 120 bp, Homo sapiens; identical to SEQ ID NO: 62720
  misc_feature: 583 for SV(C|O) and mtDNA

SEQ ID NO: 77836 - DNA, 120 bp, Homo sapiens
  misc_feature: 583 for SV(C|O) and mtDNA
ctcctattcttgcacgaaacgggatcaaacaaccccctaggaatcacctcccattccgataaaatcaccttccacccttactacacaatcaaagacgccctcggcttacttctcttcctt

SEQ ID NO: 77837 - DNA, 120 bp, Homo sapiens
  misc_feature: 583 for SV(C|O) and mtDNA
ctcagggatgggttcgattctcatagtcctagaaataagggggtttaagctcctattatttactctatcaaagtaactcttttatcagacatatttcttaggtttgagggggaatgctgg

SEQ ID NO: 77838 - DNA, 120 bp, Homo sapiens
  misc_feature: 583 for SV(C|O) and mtDNA
agtatttagttggggcatttcactgtaaagaggtgttggttctcttaatctttaacttaaaaggttaatgctaagttagctttacagtgggctctagagggggtagagggggtgctatag

SEQ ID NO: 77839 - DNA, 120 bp, Homo sapiens; identical to SEQ ID NO: 60838
  misc_feature: 583 for SV(C|O) and mtDNA

SEQ ID NO: 77840 - DNA, 120 bp, Homo sapiens
  misc_feature: 583 for SV(C|O) and mtDNA
ccatggatgacccccctcagataggggtcccttgaccaccatcctccgtgaaatcaatatcccgcacaagagtgctactctcctcgctccgggcccataacacttgggggtagctaaagt

SEQ ID NO: 77841 - DNA, 120 bp, Homo sapiens
  misc_feature: 583 for SV(C|O) and mtDNA
cagaaaatagcccactaatccaaactctaacactatgcttaggcgctatcaccactctgttcgcagcagtctgcgcccttacacaaaatgacatcaaaaaaatcgtagccttctccactt

SEQ ID NO: 77842 - DNA, 120 bp, Homo sapiens
  misc_feature: 583 for SV(C|O) and mtDNA
aggtgtggttggttgatgccgattgtaactattatgagtcctagttgacttgaagtggagaaggctacgatttttttgatgtcattttgtgtaagggcgcagactgctgcgaacagagtg

SEQ ID NO: 77843 - DNA, 120 bp, Homo sapiens
  misc_feature: 583 for SV(C|O) and mtDNA
atgtctagtgatgagtttgctaatacaatgccagtcaggccgcctacggtgaaaagaaagatgaatcctagggctcagagcactgcagcagatcatttcatattgcttccgtggagtgtg

SEQ ID NO: 77844 - DNA, 120 bp, Homo sapiens
  misc_feature: 583 for SV(C|O) and mtDNA
atgttagcttgtttcaggtgcgagatagtagtagggtcgtggtgctggagtttaagttgagtagtaggaatgcggtagtagttaggataatataaatagttaaattaagaatggttatgt

SEQ ID NO: 77845 - DNA, 120 bp, Homo sapiens
  misc_feature: 583 for SV(C|O) and mtDNA
aattatgcctttttgggttgaggtgatgatggaggtggagatttggtgctgtgaaattgttttaggtaatagcttttctagtcaggttaggtctaggaggagtaggggcaggttttggct

SEQ ID NO: 77846 - DNA, 120 bp, Homo sapiens
  misc_feature: 582 for SV(C|O) and mtDNA
tttttgatgacttctagcaagcctcgctaacctcgccttaccccccactattaacctactgggagaactctctgtgctagtaaccacgttctcctgatcaaatatcactctcctacttac

SEQ ID NO: 77847 - DNA, 120 bp, Homo sapiens; identical to SEQ ID NO: 62505
  misc_feature: 582 for SV(C|O) and mtDNA

SEQ ID NO: 77848 - DNA, 120 bp, Homo sapiens; identical to SEQ ID NO: 62513
  misc_feature: 582 for SV(C|O) and mtDNA

SEQ ID NO: 77849 - DNA, 120 bp, Homo sapiens
  misc_feature: 582 for SV(C|O) and mtDNA
actaggactcataatagttacaatcggcatcaaccaaccacacctagcattcctgcacatctgtacccacgccttcttcaaagccatactatttatgtgctccgggtccatcatccacaa

SEQ ID NO: 77850 - DNA, 120 bp, Homo sapiens
  misc_feature: 582 for SV(C|O) and mtDNA
gtagtaagggtggaaggtgattttatcggaatgggaggtgattcctagggggttgtttgatcccgtttcgtgcaagaataggaggtggagtgctgctagggctgcaataatgaagggcaa

SEQ ID NO: 77851 - DNA, 120 bp, Homo sapiens
  misc_feature: 582 for SV(C|O) and mtDNA
gcgacctgcgactccttgacgttgacaatcgagtagtactcccgattgaagcccccattcgtataataattacatcacaagacgtcttgcactcatgagctgtccccacattaggcttaa

SEQ ID NO: 77852 - DNA, 120 bp, Homo sapiens
  misc_feature: 582 for SV(C|O) and mtDNA
tccttgtactatccctatgaggcataattataacaagctccatctgcctacgacaaacagacctaaaatcgctcattgcatactcttcaatcagccacatagccctcgtagtaacagcca

SEQ ID NO: 77853 - DNA, 120 bp, Homo sapiens
  misc_feature: 582 for SV(C|O) and mtDNA
cctccctgttcttatgaattcgaacagcatacccccgattccgctacgaccaactcatacacctcctatgaaaaaacttcctaccactcaccctagcattacttatatgatatgtctcca

SEQ ID NO: 77854 - DNA, 120 bp, Homo sapiens
  misc_feature: 582 for SV(C|O) and mtDNA
gacaatgaaccataaccaatactaccaatcaatactcatcattaataatcataatggctatagcaataaaactaggaatagccccctttcacttctgggtcccagaggttacccaaggca

SEQ ID NO: 77855 - DNA, 120 bp, Homo sapiens
  misc_feature: 582 for SV(C|O) and mtDNA
tgcactcatgagctgtccccacattaggcttaaaaacagatgcaattcccggacgtctaaaccaaaccactttcaccgctacacgaccgggggtatactacggtcaatgctctgaaatct

SEQ ID NO: 77856 - DNA, 120 bp, Homo sapiens; identical to SEQ ID NO: 57631
  misc_feature: 582 for SV(C|O) and mtDNA

SEQ ID NO: 77857 - DNA, 120 bp, Homo sapiens
  misc_feature: 582 for SV(C|O) and mtDNA
ggcaggcgccaaggagtgagccgaagtttcatcatgcggagatgttggatggggtggggaggtcgatgaatgagtggttaattaattttattagggggttaattttgcgtattggggtca

SEQ ID NO: 77858 - DNA, 120 bp, Homo sapiens
  misc_feature: 582 for SV(C|O) and mtDNA
agtaagggtggaaggtgattttatcggaatgggaggtgattcctagggggttgtttgatcccgtttcgtgcaagaataggaggtggagtgctgctagggctgcaataatgaagggcaaga

SEQ ID NO: 77859 - DNA, 120 bp, Homo sapiens
  misc_feature: 582 for SV(C|O) and mtDNA
agggatgggttcgattctcatagtcctagaaataagggggtttaagctcctattatttactctatcaaagtaactcttttatcagacatatttcttaggtttgagggggaatgctggaga

SEQ ID NO: 77860 - DNA, 120 bp, Homo sapiens
  misc_feature: 582 for SV(C|O) and mtDNA
atgcgactgtgagtgcgttcgtagtttgagtttgctaggcagaatagtaatgaggatgtaagtccgtgggcgattatgagaatgactgcgccggtgaagcttcagggggtttggatgaga

SEQ ID NO: 77861 - DNA, 120 bp, Homo sapiens; identical to SEQ ID NO: 62333
  misc_feature: 582 for SV(C|O) and mtDNA

SEQ ID NO: 77862 - DNA, 120 bp, Homo sapiens
  misc_feature: 582 for SV(C|O) and mtDNA
gggcaaaaagccggttagcgggggcaggcctcctagggagaggagggtggatggaattaagggtgttagtcatgttagcttgtttcaggtgcgagatagtagtagggtcgtggtgctgga

SEQ ID NO: 77863 - DNA, 120 bp, Homo sapiens
  misc_feature: 582 for SV(C|O) and mtDNA
tccaagtgcactttccagtacacttaccatgttacgacttgtctcctctatataaatgcgtaggggttttagttaaatgtcctttgaagtatacttgaggagggtgacgggcggtgtgta

SEQ ID NO: 77864 - DNA, 120 bp, Homo sapiens; identical to SEQ ID NO: 62638
  misc_feature: 582 for SV(C|O) and mtDNA

SEQ ID NO: 77865 - DNA, 120 bp, Homo sapiens
  misc_feature: 582 for SV(C|O) and mtDNA
gcttcctacactattaaagtttaccacaaccaccaccccatcatactctttcacccacagcaccaatcctacctccatcgctaaccccactaaaacactcaccaagacctcaacccctga

SEQ ID NO: 77866 - DNA, 120 bp, Homo sapiens
  misc_feature: 582 for SV(C|O) and mtDNA
aataggaggactactcaaaaccatacctctcacttcaacctccctcaccattggcagcctagcattagcaggaatacctttcctcacaggtttctactccaaagaccacatcatcgaaac

SEQ ID NO: 77867 - DNA, 120 bp, Homo sapiens; identical to SEQ ID NO: 60514
  misc_feature: 582 for SV(C|O) and mtDNA

SEQ ID NO: 77868 - DNA, 120 bp, Homo sapiens
  misc_feature: 582 for SV(C|O) and mtDNA
gttacatcgcgccatcattggtatatggttagtgtgttggttagtaggcctagtatgaggagcgttatggagtggaagtgaaatcacatggctaggccggaggtcattaggagggctgag

SEQ ID NO: 77869 - DNA, 120 bp, Homo sapiens
  misc_feature: 582 for SV(C|O) and mtDNA
gtaagggtggaaggtgattttatcggaatgggaggtgattcctagggggttgtttgatcccgtttcgtgcaagaataggaggtggagtgctgctagggctgcaataatgaagggcaagat

SEQ ID NO: 77870 - DNA, 120 bp, Homo sapiens
  misc_feature: 582 for SV(C|O) and mtDNA
cgggaaaaaaggcgggagaagccccggcaggtttgaagctgcttcttcgaatttgcaattcaatatgaaaatcacctcggagctggtaaaaagaggcctaacccctgtctttagatttac

SEQ ID NO: 77871 - DNA, 120 bp, Homo sapiens
  misc_feature: 582 for SV(C|O) and mtDNA
ccctcttcgtctgatccgtcctaatcacagcagtcctacttctcctatctctcccagtcctagctgctggcatcactatactactaacagaccgcaacctcaacaccaccttcttcgacc

SEQ ID NO: 77872 - DNA, 120 bp, Homo sapiens
  misc_feature: 582 for SV(C|O) and mtDNA
gggatgggttcgattctcatagtcctagaaataagggggtttaagctcctattatttactctatcaaagtaactcttttatcagacatatttcttaggtttgagggggaatgctggagat

SEQ ID NO: 77873 - DNA, 120 bp, Homo sapiens
  misc_feature: 582 for SV(C|O) and mtDNA
ggctactgctcgcagtgcgccgatcagggcgtagtttgagtttgatgctcaccctgatcagaggattgagtaaacggctaggctagaggtggctagaataaataggaggcctaggttgag

SEQ ID NO: 77874 - DNA, 120 bp, Homo sapiens
  misc_feature: 582 for SV(C|O) and mtDNA
gctttttgatgacttctagcaagcctcgctaacctcgccttaccccccactattaacctactgggagaactctctgtgctagtaaccacgttctcctgatcaaatatcactctcctactt

SEQ ID NO: 77875 - DNA, 120 bp, Homo sapiens
  misc_feature: 582 for SV(C|O) and mtDNA
gcctagtatgaggagcgttatggagtggaagtgaaatcacatggctaggccggaggtcattaggagggctgagagggcccctgttaggggtcatgggctgggttttactatatgataggc

SEQ ID NO: 77876 - DNA, 120 bp, Homo sapiens
  misc_feature: 582 for SV(C|O) and mtDNA
acaccaatgaccccaatacgcaaaattaaccccctaataaaattaattaaccactcattcatcgacctccccaccccatccaacatctccgcatgatgaaacttcggctcactccttggc

SEQ ID NO: 77877 - DNA, 120 bp, Homo sapiens; identical to SEQ ID NO: 58751
  misc_feature: 582 for SV(C|O) and mtDNA

SEQ ID NO: 77878 - DNA, 120 bp, Homo sapiens
  misc_feature: 582 for SV(C|O) and mtDNA
caatactaccaatcaatactcatcattaataatcataatggctatagcaataaaactaggaatagccccctttcacttctgggtcccagaggttacccaaggcacccctctgacatccgg

SEQ ID NO: 77879 - DNA, 120 bp, Homo sapiens
  misc_feature: 582 for SV(C|O) and mtDNA
ccgccgggaaaaaaggcgggagaagccccggcaggtttgaagctgcttcttcgaatttgcaattcaatatgaaaatcacctcggagctggtaaaaagaggcctaacccctgtctttagat

SEQ ID NO: 77880 - DNA, 120 bp, Homo sapiens
  misc_feature: 582 for SV(C|O) and mtDNA
agagaggattatgatgcgactgtgagtgcgttcgtagtttgagtttgctaggcagaatagtaatgaggatgtaagtccgtgggcgattatgagaatgactgcgccggtgaagcttcaggg

SEQ ID NO: 77881 - DNA, 120 bp, Homo sapiens; identical to SEQ ID NO: 61485
  misc_feature: 582 for SV(C|O) and mtDNA

SEQ ID NO: 77882 - DNA, 120 bp, Homo sapiens
  misc_feature: 582 for SV(C|O) and mtDNA
ccacagcttaaaactcaaaggacctggcggtgcttcatatccctctagaggagcctgttctgtaatcgataaaccccgatcaacctcaccacctcttgctcagcctatataccgccatct

SEQ ID NO: 77883 - DNA, 120 bp, Homo sapiens
  misc_feature: 582 for SV(C|O) and mtDNA
atgatgcgactgtgagtgcgttcgtagtttgagtttgctaggcagaatagtaatgaggatgtaagtccgtgggcgattatgagaatgactgcgccggtgaagcttcagggggtttggatg

SEQ ID NO: 77884 - DNA, 120 bp, Homo sapiens; identical to SEQ ID NO: 62597
  misc_feature: 582 for SV(C|O) and mtDNA

SEQ ID NO: 77885 - DNA, 120 bp, Homo sapiens; identical to SEQ ID NO: 56458
  misc_feature: 581 for SV(C|O) and mtDNA

SEQ ID NO: 77886 - DNA, 120 bp, Homo sapiens; identical to SEQ ID NO: 55982
  misc_feature: 581 for SV(C|O) and mtDNA

SEQ ID NO: 77887 - DNA, 120 bp, Homo sapiens
  misc_feature: 581 for SV(C|O) and mtDNA
acaccacctgtccaaaaaggccttcgatacgggataatcctatttattacctcagaagtttttttcttcgcaggatttttctgagccttttaccactccagcctagcccctaccccccaa

SEQ ID NO: 77888 - DNA, 120 bp, Homo sapiens
  misc_feature: 581 for SV(C|O) and mtDNA
gaggactactcaaaaccatacctctcacttcaacctccctcaccattggcagcctagcattagcaggaatacctttcctcacaggtttctactccaaagaccacatcatcgaaaccgcaa

SEQ ID NO: 77889 - DNA, 120 bp, Homo sapiens
  misc_feature: 581 for SV(C|O) and mtDNA
ttctcccagtaggttaatagtggggggtaaggcgaggttagcgaggcttgctagaagtcatcaaaaagctattagtgggagtagagtttgaagtccttgagagaggattatgatgcgact

SEQ ID NO: 77890 - DNA, 120 bp, Homo sapiens
  misc_feature: 581 for SV(C|O) and mtDNA
ttctcagggatgggttcgattctcatagtcctagaaataagggggtttaagctcctattatttactctatcaaagtaactcttttatcagacatatttcttaggtttgagggggaatgct

SEQ ID NO: 77891 - DNA, 120 bp, Homo sapiens
  misc_feature: 581 for SV(C|O) and mtDNA
cccatgaggtggcaagaaatgggctacattttctaccccagaaaactacgatagcccttatgaaacttaagggtcgaaggtggatttagcagtaaactgagagtagagtgcttagttgaa

SEQ ID NO: 77892 - DNA, 120 bp, Homo sapiens
  misc_feature: 581 for SV(C|O) and mtDNA
ttactatccatcctcatcctagcaataatccccatcctccatatatccaaacaacaaagcataatatttcgcccactaagccaatcactttattgactcctagccgcagacctcctcatt

SEQ ID NO: 77893 - DNA, 120 bp, Homo sapiens
  misc_feature: 581 for SV(C|O) and mtDNA
aactaggactcataatagttacaatcggcatcaaccaaccacacctagcattcctgcacatctgtacccacgccttcttcaaagccatactatttatgtgctccgggtccatcatccaca

SEQ ID NO: 77894 - DNA, 120 bp, Homo sapiens; identical to SEQ ID NO: 61035
  misc_feature: 581 for SV(C|O) and mtDNA

SEQ ID NO: 77895 - DNA, 120 bp, Homo sapiens
  misc_feature: 581 for SV(C|O) and mtDNA
tggtaagggagggatcgttgacctcgtctgttatgtaaaggatgcgcagggatgggagggcgatgaggactaggatgatggcgggcaggatagttcagacggtttctatttcctgagcgt

SEQ ID NO: 77896 - DNA, 120 bp, Homo sapiens; identical to SEQ ID NO: 62188
  misc_feature: 581 for SV(C|O) and mtDNA

SEQ ID NO: 77897 - DNA, 120 bp, Homo sapiens
  misc_feature: 581 for SV(C|O) and mtDNA
tcctagaaccaggcgacctgcgactccttgacgttgacaatcgagtagtactcccgattgaagcccccattcgtataataattacatcacaagacgtcttgcactcatgagctgtcccca

SEQ ID NO: 77898 - DNA, 120 bp, Homo sapiens
  misc_feature: 581 for SV(C|O) and mtDNA
tgggcaaaaagccggttagcgggggcaggcctcctagggagaggagggtggatggaattaagggtgttagtcatgttagcttgtttcaggtgcgagatagtagtagggtcgtggtgctgg

SEQ ID NO: 77899 - DNA, 120 bp, Homo sapiens
  misc_feature: 581 for SV(C|O) and mtDNA
ccaagtattgactcacccatcaacaaccgctatgtaattcgtacattactgccagccaccatgaatattgtacggtaccataaatacttgaccacctgtagtacataaaaacccaatcca

SEQ ID NO: 77900 - DNA, 120 bp, Homo sapiens
  misc_feature: 581 for SV(C|O) and mtDNA
tgatgcgactgtgagtgcgttcgtagtttgagtttgctaggcagaatagtaatgaggatgtaagtccgtgggcgattatgagaatgactgcgccggtgaagcttcagggggtttggatga

SEQ ID NO: 77901 - DNA, 120 bp, Homo sapiens
  misc_feature: 581 for SV(C|O) and mtDNA
tgagaatccaaaattctccgtgccacctatcacaccccatcctaaagtaaggtcagctaaataagctatcgggcccataccccgaaaatgttggttatacccttcccgtactaattaatc

SEQ ID NO: 77902 - DNA, 120 bp, Homo sapiens
  misc_feature: 581 for SV(C|O) and mtDNA
tgaaagagtatgatggggtggtggttgtggtaaactttaatagtgtaggaagctgaataatttatgaaggagaggggtcagggttgattcgggaggatcctattggtgcgggggctttgt

SEQ ID NO: 77903 - DNA, 120 bp, Homo sapiens
  misc_feature: 581 for SV(C|O) and mtDNA
ccttgccctattactatccatcctcatcctagcaataatccccatcctccatatatccaaacaacaaagcataatatttcgcccactaagccaatcactttattgactcctagccgcaga

SEQ ID NO: 77904 - DNA, 120 bp, Homo sapiens; identical to SEQ ID NO: 59577
  misc_feature: 581 for SV(C|O) and mtDNA

SEQ ID NO: 77905 - DNA, 120 bp, Homo sapiens; identical to SEQ ID NO: 59345
  misc_feature: 581 for SV(C|O) and mtDNA

SEQ ID NO: 77906 - DNA, 120 bp, Homo sapiens
  misc_feature: 581 for SV(C|O) and mtDNA
caccctaatcaactggcttcaatctacttctcccgccgccgggaaaaaaggcgggagaagccccggcaggtttgaagctgcttcttcgaatttgcaattcaatatgaaaatcacctcgga

SEQ ID NO: 77907 - DNA, 120 bp, Homo sapiens
  misc_feature: 581 for SV(C|O) and mtDNA
ataatcatacaaagcccccgcaccaataggatcctcccgaatcaaccctgacccctctccttcataaattattcagcttcctacactattaaagtttaccacaaccaccaccccatcata

SEQ ID NO: 77908 - DNA, 120 bp, Homo sapiens; identical to SEQ ID NO: 61526
  misc_feature: 581 for SV(C|O) and mtDNA

SEQ ID NO: 77909 - DNA, 120 bp, Homo sapiens
  misc_feature: 581 for SV(C|O) and mtDNA
taggcacatgaatattgttgtggggaagagactgataataaaggtggatgcgacaatggattttacataatgggggtatgagttttttttgttagggttaacgagggtggtaaggatggg

SEQ ID NO: 77910 - DNA, 120 bp, Homo sapiens
  misc_feature: 581 for SV(C|O) and mtDNA
taggaggtggagtgctgctagggctgcaataatgaagggcaagatgaagtgaaaggtaaagaatcgtgtgagggtgggactgtctactgagtagcctcctcagattcattgaactaggtc

SEQ ID NO: 77911 - DNA, 120 bp, Homo sapiens
  misc_feature: 581 for SV(C|O) and mtDNA
atagctttttgatgacttctagcaagcctcgctaacctcgccttaccccccactattaacctactgggagaactctctgtgctagtaaccacgttctcctgatcaaatatcactctccta

SEQ ID NO: 77912 - DNA, 120 bp, Homo sapiens
  misc_feature: 581 for SV(C|O) and mtDNA
ctaatctactccacctcaatcacactactccccatatctaacaacgtaaaaataaaatgacagtttgaacatacaaaacccaccccattcctccccacactcatcgcccttaccacgcta

SEQ ID NO: 77913 - DNA, 120 bp, Homo sapiens
  misc_feature: 581 for SV(C|O) and mtDNA
taatcatacaaagcccccgcaccaataggatcctcccgaatcaaccctgacccctctccttcataaattattcagcttcctacactattaaagtttaccacaaccaccaccccatcatac

SEQ ID NO: 77914 - DNA, 120 bp, Homo sapiens; identical to SEQ ID NO: 58175
  misc_feature: 581 for SV(C|O) and mtDNA

SEQ ID NO: 77915 - DNA, 120 bp, Homo sapiens; identical to SEQ ID NO: 57491
  misc_feature: 581 for SV(C|O) and mtDNA

SEQ ID NO: 77916 - DNA, 120 bp, Homo sapiens
  misc_feature: 581 for SV(C|O) and mtDNA
ccacatgaaacatcctatcatctgtaggctcattcatttctctaacagcagtaatattaataattttcatgatttgagaagccttcgcttcgaagcgaaaagtcctaatagtagaagaac

SEQ ID NO: 77917 - DNA, 120 bp, Homo sapiens; identical to SEQ ID NO: 62135
  misc_feature: 581 for SV(C|O) and mtDNA

SEQ ID NO: 77918 - DNA, 120 bp, Homo sapiens; identical to SEQ ID NO: 61769
  misc_feature: 581 for SV(C|O) and mtDNA

SEQ ID NO: 77919 - DNA, 120 bp, Homo sapiens; identical to SEQ ID NO: 55296
  misc_feature: 581 for SV(C|O) and mtDNA

SEQ ID NO: 77920 - DNA, 120 bp, Homo sapiens
  misc_feature: 581 for SV(C|O) and mtDNA
atcctcttcaacaatatactctccggacaatgaaccataaccaatactaccaatcaatactcatcattaataatcataatggctatagcaataaaactaggaatagccccctttcacttc

SEQ ID NO: 77921 - DNA, 120 bp, Homo sapiens; identical to SEQ ID NO: 57882
  misc_feature: 581 for SV(C|O) and mtDNA

SEQ ID NO: 77922 - DNA, 120 bp, Homo sapiens
  misc_feature: 581 for SV(C|O) and mtDNA
ctcagacgctcaggaaatagaaaccgtctgaactatcctgcccgccatcatcctagtcctcatcgccctcccatccctgcgcatcctttacataacagacgaggtcaacgatccctccct

SEQ ID NO: 77923 - DNA, 120 bp, Homo sapiens
  misc_feature: 581 for SV(C|O) and mtDNA
aggcagataaagaatattgaggcgccattggcgtgaaggtagcggatgattcagccataatttacgtctcgagtgatgtgggcgattgatgaaaaggcggttgaggcgtctggtgagtag

SEQ ID NO: 77924 - DNA, 120 bp, Homo sapiens; identical to SEQ ID NO: 60527
  misc_feature: 581 for SV(C|O) and mtDNA

SEQ ID NO: 77925 - DNA, 120 bp, Homo sapiens
  misc_feature: 581 for SV(C|O) and mtDNA
cggtagtatttagttggggcatttcactgtaaagaggtgttggttctcttaatctttaacttaaaaggttaatgctaagttagctttacagtgggctctagagggggtagagggggtgct

SEQ ID NO: 77926 - DNA, 120 bp, Homo sapiens; identical to SEQ ID NO: 61426
  misc_feature: 581 for SV(C|O) and mtDNA

SEQ ID NO: 77927 - DNA, 120 bp, Homo sapiens
  misc_feature: 581 for SV(C|O) and mtDNA
aataggaggtggagtgctgctagggctgcaataatgaagggcaagatgaagtgaaaggtaaagaatcgtgtgagggtgggactgtctactgagtagcctcctcagattcattgaactagg

SEQ ID NO: 77928 - DNA, 120 bp, Homo sapiens
  misc_feature: 581 for SV(C|O) and mtDNA
ccatcatcctagtcctcatcgccctcccatccctgcgcatcctttacataacagacgaggtcaacgatccctcccttaccatcaaatcaattggccaccaatggtactgaacctacgagt

SEQ ID NO: 77929 - DNA, 120 bp, Homo sapiens
  misc_feature: 581 for SV(C|O) and mtDNA
aggacaaccagtaagctacccttttaccatcattggacaagtagcatccgtactatacttcacaacaatcctaatcctaataccaactatctccctaattgaaaacaaaatactcaaatg

SEQ ID NO: 77930 - DNA, 120 bp, Homo sapiens
  misc_feature: 581 for SV(C|O) and mtDNA
aaaatcagtgcgagcttagcgctgtgatgagtgtgcctgcaaagatggtagagtagatgacgggttgggccaggggattaattagtacgggaagggtataaccaacattttcggggtatg

SEQ ID NO: 77931 - DNA, 120 bp, Homo sapiens
  misc_feature: 581 for SV(C|O) and mtDNA
aagctacccttttaccatcattggacaagtagcatccgtactatacttcacaacaatcctaatcctaataccaactatctccctaattgaaaacaaaatactcaaatgggcctgtccttg

SEQ ID NO: 77932 - DNA, 120 bp, Homo sapiens
  misc_feature: 581 for SV(C|O) and mtDNA
ataatagttacaatcggcatcaaccaaccacacctagcattcctgcacatctgtacccacgccttcttcaaagccatactatttatgtgctccgggtccatcatccacaaccttaacaat

SEQ ID NO: 77933 - DNA, 120 bp, Homo sapiens
  misc_feature: 581 for SV(C|O) and mtDNA
atcgtcctagaattaattcccctaaaaatctttgaaatagggcccgtatttaccctatagcaccccctctaccccctctagagcccactgtaaagctaacttagcattaaccttttaagt

SEQ ID NO: 77934 - DNA, 120 bp, Homo sapiens
  misc_feature: 581 for SV(C|O) and mtDNA
atcacgccctcataatcattttccttatctgcttcctagtcctgtatgcccttttcctaacactcacaacaaaactaactaatactaacatctcagacgctcaggaaatagaaaccgtct

SEQ ID NO: 77935 - DNA, 120 bp, Homo sapiens; identical to SEQ ID NO: 59868
  misc_feature: 580 for SV(C|O) and mtDNA

SEQ ID NO: 77936 - DNA, 120 bp, Homo sapiens
  misc_feature: 580 for SV(C|O) and mtDNA
actcataatagttacaatcggcatcaaccaaccacacctagcattcctgcacatctgtacccacgccttcttcaaagccatactatttatgtgctccgggtccatcatccacaaccttaa

SEQ ID NO: 77937 - DNA, 120 bp, Homo sapiens; identical to SEQ ID NO: 62516
  misc_feature: 580 for SV(C|O) and mtDNA

SEQ ID NO: 77938 - DNA, 120 bp, Homo sapiens; identical to SEQ ID NO: 63026
  misc_feature: 580 for SV(C|O) and mtDNA

SEQ ID NO: 77939 - DNA, 120 bp, Homo sapiens; identical to SEQ ID NO: 58553
  misc_feature: 580 for SV(C|O) and mtDNA

SEQ ID NO: 77940 - DNA, 120 bp, Homo sapiens
  misc_feature: 580 for SV(C|O) and mtDNA
tgcactttccagtacacttaccatgttacgacttgtctcctctatataaatgcgtaggggttttagttaaatgtcctttgaagtatacttgaggagggtgacgggcggtgtgtacgcgct

SEQ ID NO: 77941 - DNA, 120 bp, Homo sapiens
  misc_feature: 580 for SV(C|O) and mtDNA
ggttgttagggggtcggaggaaaaggttggggaacagctaaataggttgttgttgatttggttaaaaaatagtagagggatgatgctaataattaggctgtgggtggttgtgttgattca

SEQ ID NO: 77942 - DNA, 120 bp, Homo sapiens
  misc_feature: 580 for SV(C|O) and mtDNA
tctaacctccctgttcttatgaattcgaacagcatacccccgattccgctacgaccaactcatacacctcctatgaaaaaacttcctaccactcaccctagcattacttatatgatatgt

SEQ ID NO: 77943 - DNA, 120 bp, Homo sapiens
  misc_feature: 580 for SV(C|O) and mtDNA
tctaacaacatggctttctcaacttttaaaggataacagctatccattggtcttaggccccaaaaattttggtgcaactccaaataaaagtaacaaccatgcacactactataaccaccc

SEQ ID NO: 77944 - DNA, 120 bp, Homo sapiens
  misc_feature: 580 for SV(C|O) and mtDNA
tcctattcttgcacgaaacgggatcaaacaaccccctaggaatcacctcccattccgataaaatcaccttccacccttactacacaatcaaagacgccctcggcttacttctcttccttc

SEQ ID NO: 77945 - DNA, 120 bp, Homo sapiens; identical to SEQ ID NO: 60004
  misc_feature: 580 for SV(C|O) and mtDNA

SEQ ID NO: 77946 - DNA, 120 bp, Homo sapiens
  misc_feature: 580 for SV(C|O) and mtDNA
agcttctgactcttacctccctctctcctactcctgctcgcatctgctatagtggaggccggagcaggaacaggttgaacagtctaccctcccttagcagggaactactcccaccctgga

SEQ ID NO: 77947 - DNA, 120 bp, Homo sapiens
  misc_feature: 580 for SV(C|O) and mtDNA
tcaccaagaccctacttctaacctccctgttcttatgaattcgaacagcatacccccgattccgctacgaccaactcatacacctcctatgaaaaaacttcctaccactcaccctagcat

SEQ ID NO: 77948 - DNA, 120 bp, Homo sapiens
  misc_feature: 580 for SV(C|O) and mtDNA
tatcactgttcattatagctactctcataaccctcaacacccactccctcttagccaatattgtgcctattgccatactagtctttgccgcctgcgaagcagcggtgggcctagccctac

SEQ ID NO: 77949 - DNA, 120 bp, Homo sapiens
  misc_feature: 580 for SV(C|O) and mtDNA
tagtatttagttggggcatttcactgtaaagaggtgttggttctcttaatctttaacttaaaaggttaatgctaagttagctttacagtgggctctagagggggtagagggggtgctata

SEQ ID NO: 77950 - DNA, 120 bp, Homo sapiens
  misc_feature: 580 for SV(C|O) and mtDNA
tagtaagggtggaaggtgattttatcggaatgggaggtgattcctagggggttgtttgatcccgtttcgtgcaagaataggaggtggagtgctgctagggctgcaataatgaagggcaag

SEQ ID NO: 77951 - DNA, 120 bp, Homo sapiens
  misc_feature: 580 for SV(C|O) and mtDNA
taggtgtggttggttgatgccgattgtaactattatgagtcctagttgacttgaagtggagaaggctacgatttttttgatgtcattttgtgtaagggcgcagactgctgcgaacagagt

SEQ ID NO: 77952 - DNA, 120 bp, Homo sapiens
  misc_feature: 580 for SV(C|O) and mtDNA
tagctttttgatgacttctagcaagcctcgctaacctcgccttaccccccactattaacctactgggagaactctctgtgctagtaaccacgttctcctgatcaaatatcactctcctac

SEQ ID NO: 77953 - DNA, 120 bp, Homo sapiens
  misc_feature: 580 for SV(C|O) and mtDNA
ctttttgatgacttctagcaagcctcgctaacctcgccttaccccccactattaacctactgggagaactctctgtgctagtaaccacgttctcctgatcaaatatcactctcctactta

SEQ ID NO: 77954 - DNA, 120 bp, Homo sapiens; identical to SEQ ID NO: 62283
  misc_feature: 580 for SV(C|O) and mtDNA

SEQ ID NO: 77955 - DNA, 120 bp, Homo sapiens
  misc_feature: 580 for SV(C|O) and mtDNA
gctatcctcttcaacaatatactctccggacaatgaaccataaccaatactaccaatcaatactcatcattaataatcataatggctatagcaataaaactaggaatagccccctttcac

SEQ ID NO: 77956 - DNA, 120 bp, Homo sapiens
  misc_feature: 580 for SV(C|O) and mtDNA
ggcaggttttggctcgtaagaaggcctagataggggattgtgcggtgtgtgatggtagggtagaatccgagtatgttggagaaataaaatgtgcatagtggggattttattttaagtttg

SEQ ID NO: 77957 - DNA, 120 bp, Homo sapiens
  misc_feature: 580 for SV(C|O) and mtDNA
cttccttgtactatccctatgaggcataattataacaagctccatctgcctacgacaaacagacctaaaatcgctcattgcatactcttcaatcagccacatagccctcgtagtaacagc

SEQ ID NO: 77958 - DNA, 120 bp, Homo sapiens
  misc_feature: 580 for SV(C|O) and mtDNA
agtcctgtatgcccttttcctaacactcacaacaaaactaactaatactaacatctcagacgctcaggaaatagaaaccgtctgaactatcctgcccgccatcatcctagtcctcatcgc

SEQ ID NO: 77959 - DNA, 120 bp, Homo sapiens; identical to SEQ ID NO: 62551
  misc_feature: 580 for SV(C|O) and mtDNA

SEQ ID NO: 77960 - DNA, 120 bp, Homo sapiens
  misc_feature: 580 for SV(C|O) and mtDNA
acaaccgctatgtaattcgtacattactgccagccaccatgaatattgtacggtaccataaatacttgaccacctgtagtacataaaaacccaatccacatcaaaaccccctccccatgc

SEQ ID NO: 77961 - DNA, 120 bp, Homo sapiens
  misc_feature: 580 for SV(C|O) and mtDNA
gcagtgagagtgagtagtagaatgtttagtgagcctagggtgttgtgagtgtaaattagtgcgatgagtaggggaagggagcctactagggtgtagaataggaagtatgtgcctgcgttc

SEQ ID NO: 77962 - DNA, 120 bp, Homo sapiens
  misc_feature: 580 for SV(C|O) and mtDNA
gcactttccagtacacttaccatgttacgacttgtctcctctatataaatgcgtaggggttttagttaaatgtcctttgaagtatacttgaggagggtgacgggcggtgtgtacgcgctt

SEQ ID NO: 77963 - DNA, 120 bp, Homo sapiens; identical to SEQ ID NO: 61796
  misc_feature: 580 for SV(C|O) and mtDNA

SEQ ID NO: 77964 - DNA, 120 bp, Homo sapiens
  misc_feature: 580 for SV(C|O) and mtDNA
actcaagcactatagttgtagcaggaatcttcttactcatccgcttccaccccctagcagaaaatagcccactaatccaaactctaacactatgcttaggcgctatcaccactctgttcg

SEQ ID NO: 77965 - DNA, 120 bp, Homo sapiens; identical to SEQ ID NO: 62340
  misc_feature: 580 for SV(C|O) and mtDNA

SEQ ID NO: 77966 - DNA, 120 bp, Homo sapiens; identical to SEQ ID NO: 56882
  misc_feature: 580 for SV(C|O) and mtDNA

SEQ ID NO: 77967 - DNA, 120 bp, Homo sapiens; identical to SEQ ID NO: 62852
  misc_feature: 580 for SV(C|O) and mtDNA

SEQ ID NO: 77968 - DNA, 120 bp, Homo sapiens; identical to SEQ ID NO: 61663
  misc_feature: 580 for SV(C|O) and mtDNA

SEQ ID NO: 77969 - DNA, 120 bp, Homo sapiens; identical to SEQ ID NO: 55524
  misc_feature: 580 for SV(C|O) and mtDNA

SEQ ID NO: 77970 - DNA, 120 bp, Homo sapiens; identical to SEQ ID NO: 62311
  misc_feature: 580 for SV(C|O) and mtDNA

SEQ ID NO: 77971 - DNA, 120 bp, Homo sapiens
  misc_feature: 580 for SV(C|O) and mtDNA
atggaggtggagatttggtgctgtgaaattgttttaggtaatagcttttctagtcaggttaggtctaggaggagtaggggcaggttttggctcgtaagaaggcctagataggggattgtg

SEQ ID NO: 77972 - DNA, 120 bp, Homo sapiens; identical to SEQ ID NO: 60176
  misc_feature: 580 for SV(C|O) and mtDNA

SEQ ID NO: 77973 - DNA, 120 bp, Homo sapiens
  misc_feature: 579 for SV(C|O) and mtDNA
aggactactcaaaaccatacctctcacttcaacctccctcaccattggcagcctagcattagcaggaatacctttcctcacaggtttctactccaaagaccacatcatcgaaaccgcaaa

SEQ ID NO: 77974 - DNA, 120 bp, Homo sapiens
  misc_feature: 579 for SV(C|O) and mtDNA
ttgttagggggtcggaggaaaaggttggggaacagctaaataggttgttgttgatttggttaaaaaatagtagagggatgatgctaataattaggctgtgggtggttgtgttgattcaaa

SEQ ID NO: 77975 - DNA, 120 bp, Homo sapiens
  misc_feature: 579 for SV(C|O) and mtDNA
tagttggggcatttcactgtaaagaggtgttggttctcttaatctttaacttaaaaggttaatgctaagttagctttacagtgggctctagagggggtagagggggtgctatagggtaaa

SEQ ID NO: 77976 - DNA, 120 bp, Homo sapiens
  misc_feature: 579 for SV(C|O) and mtDNA
acttctagcaagcctcgctaacctcgccttaccccccactattaacctactgggagaactctctgtgctagtaaccacgttctcctgatcaaatatcactctcctacttacaggactcaa

SEQ ID NO: 77977 - DNA, 120 bp, Homo sapiens
  misc_feature: 579 for SV(C|O) and mtDNA
ttccttgtactatccctatgaggcataattataacaagctccatctgcctacgacaaacagacctaaaatcgctcattgcatactcttcaatcagccacatagccctcgtagtaacagcc

SEQ ID NO: 77978 - DNA, 120 bp, Homo sapiens
  misc_feature: 579 for SV(C|O) and mtDNA
ttaatgacattaacactattctcaccagacctcctaggcgacccagacaattataccctagccaaccccttaaacacccctccccacatcaagcccgaatgatatttcctattcgcctac

SEQ ID NO: 77979 - DNA, 120 bp, Homo sapiens
  misc_feature: 579 for SV(C|O) and mtDNA
tgttagcttgtttcaggtgcgagatagtagtagggtcgtggtgctggagtttaagttgagtagtaggaatgcggtagtagttaggataatataaatagttaaattaagaatggttatgtt

SEQ ID NO: 77980 - DNA, 120 bp, Homo sapiens
  misc_feature: 579 for SV(C|O) and mtDNA
tgtgtggtggccttggtatgtgctttctcgtgttacatcgcgccatcattggtatatggttagtgtgttggttagtaggcctagtatgaggagcgttatggagtggaagtgaaatcacat

SEQ ID NO: 77981 - DNA, 120 bp, Homo sapiens
  misc_feature: 579 for SV(C|O) and mtDNA
aagtattgactcacccatcaacaaccgctatgtaattcgtacattactgccagccaccatgaatattgtacggtaccataaatacttgaccacctgtagtacataaaaacccaatccaca

SEQ ID NO: 77982 - DNA, 120 bp, Homo sapiens
  misc_feature: 579 for SV(C|O) and mtDNA
tggcacccaaatctgcttccccatgaaagaacagagaatagtttaaattagaatcttagctttgggtgctaatggtggagttaaagactttttctctgatttgtccttggaaaaaggttt

SEQ ID NO: 77983 - DNA, 120 bp, Homo sapiens
  misc_feature: 579 for SV(C|O) and mtDNA
tgcaactatagcaacagccttcataggctatgtcctcccgtgaggccaaatatcattctgaggggccacagtaattacaaacttactatccgccatcccatacattgggacagacctagt

SEQ ID NO: 77984 - DNA, 120 bp, Homo sapiens
  misc_feature: 579 for SV(C|O) and mtDNA
ctcaaaaccatacctctcacttcaacctccctcaccattggcagcctagcattagcaggaatacctttcctcacaggtttctactccaaagaccacatcatcgaaaccgcaaacatatca

SEQ ID NO: 77985 - DNA, 120 bp, Homo sapiens
  misc_feature: 579 for SV(C|O) and mtDNA
tgaactgacaattaacagcccaatatctacaatcaaccaacaagtcattattaccctcactgtcaacccaacacaggcatgctcataaggaaaggttaaaaaaagtaaaaggaactcggc

SEQ ID NO: 77986 - DNA, 120 bp, Homo sapiens
  misc_feature: 579 for SV(C|O) and mtDNA
tctcagggatgggttcgattctcatagtcctagaaataagggggtttaagctcctattatttactctatcaaagtaactcttttatcagacatatttcttaggtttgagggggaatgctg

SEQ ID NO: 77987 - DNA, 120 bp, Homo sapiens
  misc_feature: 579 for SV(C|O) and mtDNA
tcgccttaccccccactattaacctactgggagaactctctgtgctagtaaccacgttctcctgatcaaatatcactctcctacttacaggactcaacatactagtcacagccctatact

SEQ ID NO: 77988 - DNA, 120 bp, Homo sapiens; identical to SEQ ID NO: 61641
  misc_feature: 579 for SV(C|O) and mtDNA

SEQ ID NO: 77989 - DNA, 120 bp, Homo sapiens; identical to SEQ ID NO: 57992
  misc_feature: 579 for SV(C|O) and mtDNA

SEQ ID NO: 77990 - DNA, 120 bp, Homo sapiens; identical to SEQ ID NO: 59517
  misc_feature: 579 for SV(C|O) and mtDNA

SEQ ID NO: 77991 - DNA, 120 bp, Homo sapiens
  misc_feature: 579 for SV(C|O) and mtDNA
tcacttctgggtcccagaggttacccaaggcacccctctgacatccggcctgcttcttctcacatgacaaaaactagcccccatctcaatcatataccaaatctctccctcactaaacgt

SEQ ID NO: 77992 - DNA, 120 bp, Homo sapiens
  misc_feature: 579 for SV(C|O) and mtDNA
tatcctcttcaacaatatactctccggacaatgaaccataaccaatactaccaatcaatactcatcattaataatcataatggctatagcaataaaactaggaatagccccctttcactt

SEQ ID NO: 77993 - DNA, 120 bp, Homo sapiens
  misc_feature: 579 for SV(C|O) and mtDNA
tatagcaacagccttcataggctatgtcctcccgtgaggccaaatatcattctgaggggccacagtaattacaaacttactatccgccatcccatacattgggacagacctagttcaatg

SEQ ID NO: 77994 - DNA, 120 bp, Homo sapiens
  misc_feature: 579 for SV(C|O) and mtDNA
tacggtagtatttagttggggcatttcactgtaaagaggtgttggttctcttaatctttaacttaaaaggttaatgctaagttagctttacagtgggctctagagggggtagagggggtg

SEQ ID NO: 77995 - DNA, 120 bp, Homo sapiens
  misc_feature: 579 for SV(C|O) and mtDNA
ggactactcaaaaccatacctctcacttcaacctccctcaccattggcagcctagcattagcaggaatacctttcctcacaggtttctactccaaagaccacatcatcgaaaccgcaaac

SEQ ID NO: 77996 - DNA, 120 bp, Homo sapiens; identical to SEQ ID NO: 54093
  misc_feature: 579 for SV(C|O) and mtDNA

SEQ ID NO: 77997 - DNA, 120 bp, Homo sapiens
  misc_feature: 579 for SV(C|O) and mtDNA
gtgtggttggttgatgccgattgtaactattatgagtcctagttgacttgaagtggagaaggctacgatttttttgatgtcattttgtgtaagggcgcagactgctgcgaacagagtggt

SEQ ID NO: 77998 - DNA, 120 bp, Homo sapiens
  misc_feature: 579 for SV(C|O) and mtDNA
caagtattgactcacccatcaacaaccgctatgtaattcgtacattactgccagccaccatgaatattgtacggtaccataaatacttgaccacctgtagtacataaaaacccaatccac

SEQ ID NO: 77999 - DNA, 120 bp, Homo sapiens; identical to SEQ ID NO: 62599
  misc_feature: 579 for SV(C|O) and mtDNA

SEQ ID NO: 78000 - DNA, 120 bp, Homo sapiens
  misc_feature: 579 for SV(C|O) and mtDNA
gtcctgtatgcccttttcctaacactcacaacaaaactaactaatactaacatctcagacgctcaggaaatagaaaccgtctgaactatcctgcccgccatcatcctagtcctcatcgcc

SEQ ID NO: 78001 - DNA, 120 bp, Homo sapiens
  misc_feature: 579 for SV(C|O) and mtDNA
atcatcctagtcctcatcgccctcccatccctgcgcatcctttacataacagacgaggtcaacgatccctcccttaccatcaaatcaattggccaccaatggtactgaacctacgagtac

SEQ ID NO: 78002 - DNA, 120 bp, Homo sapiens
  misc_feature: 579 for SV(C|O) and mtDNA
gatgaagtgaaaggtaaagaatcgtgtgagggtgggactgtctactgagtagcctcctcagattcattgaactaggtctgtcccaatgtatgggatggcggatagtaagtttgtaattac

SEQ ID NO: 78003 - DNA, 120 bp, Homo sapiens
  misc_feature: 579 for SV(C|O) and mtDNA
ggtaagggagggatcgttgacctcgtctgttatgtaaaggatgcgcagggatgggagggcgatgaggactaggatgatggcgggcaggatagttcagacggtttctatttcctgagcgtc

SEQ ID NO: 78004 - DNA, 120 bp, Homo sapiens
  misc_feature: 579 for SV(C|O) and mtDNA
ggctcagagcactgcagcagatcatttcatattgcttccgtggagtgtggcgagtcagctaaatactttgacgccggtggggatagcgatgattatggtagcggaggtgaaatatgctcg

SEQ ID NO: 78005 - DNA, 120 bp, Homo sapiens; identical to SEQ ID NO: 61619
  misc_feature: 579 for SV(C|O) and mtDNA

SEQ ID NO: 78006 - DNA, 120 bp, Homo sapiens
  misc_feature: 579 for SV(C|O) and mtDNA
ctagcagcagcaggcaaatcagcccaattaggtctccacccctgactcccctcagccatagaaggccccaccccagtctcagccctactccactcaagcactatagttgtagcaggaatc

SEQ ID NO: 78007 - DNA, 120 bp, Homo sapiens
  misc_feature: 579 for SV(C|O) and mtDNA
cactaatccaaactctaacactatgcttaggcgctatcaccactctgttcgcagcagtctgcgcccttacacaaaatgacatcaaaaaaatcgtagccttctccacttcaagtcaactag

SEQ ID NO: 78008 - DNA, 120 bp, Homo sapiens
  misc_feature: 579 for SV(C|O) and mtDNA
cattatcctcctgcttgcaactatagcaacagccttcataggctatgtcctcccgtgaggccaaatatcattctgaggggccacagtaattacaaacttactatccgccatcccatacat

SEQ ID NO: 78009 - DNA, 120 bp, Homo sapiens
  misc_feature: 579 for SV(C|O) and mtDNA
catggatgacccccctcagataggggtcccttgaccaccatcctccgtgaaatcaatatcccgcacaagagtgctactctcctcgctccgggcccataacacttgggggtagctaaagtg

SEQ ID NO: 78010 - DNA, 120 bp, Homo sapiens; identical to SEQ ID NO: 63200
  misc_feature: 579 for SV(C|O) and mtDNA

SEQ ID NO: 78011 - DNA, 120 bp, Homo sapiens
  misc_feature: 579 for SV(C|O) and mtDNA
aatagcccactaatccaaactctaacactatgcttaggcgctatcaccactctgttcgcagcagtctgcgcccttacacaaaatgacatcaaaaaaatcgtagccttctccacttcaagt

SEQ ID NO: 78012 - DNA, 120 bp, Homo sapiens
  misc_feature: 579 for SV(C|O) and mtDNA
accaatcaatactcatcattaataatcataatggctatagcaataaaactaggaatagccccctttcacttctgggtcccagaggttacccaaggcacccctctgacatccggcctgctt

SEQ ID NO: 78013 - DNA, 120 bp, Homo sapiens
  misc_feature: 578 for SV(C|O) and mtDNA
ttttgatgacttctagcaagcctcgctaacctcgccttaccccccactattaacctactgggagaactctctgtgctagtaaccacgttctcctgatcaaatatcactctcctacttaca

SEQ ID NO: 78014 - DNA, 120 bp, Homo sapiens; identical to SEQ ID NO: 59899
  misc_feature: 578 for SV(C|O) and mtDNA

SEQ ID NO: 78015 - DNA, 120 bp, Homo sapiens
  misc_feature: 578 for SV(C|O) and mtDNA
ctttcacttctgggtcccagaggttacccaaggcacccctctgacatccggcctgcttcttctcacatgacaaaaactagcccccatctcaatcatataccaaatctctccctcactaaa

SEQ ID NO: 78016 - DNA, 120 bp, Homo sapiens
  misc_feature: 578 for SV(C|O) and mtDNA
tagcaacagccttcataggctatgtcctcccgtgaggccaaatatcattctgaggggccacagtaattacaaacttactatccgccatcccatacattgggacagacctagttcaatgaa

SEQ ID NO: 78017 - DNA, 120 bp, Homo sapiens; identical to SEQ ID NO: 58406
  misc_feature: 578 for SV(C|O) and mtDNA

SEQ ID NO: 78018 - DNA, 120 bp, Homo sapiens; identical to SEQ ID NO: 62566
  misc_feature: 578 for SV(C|O) and mtDNA

SEQ ID NO: 78019 - DNA, 120 bp, Homo sapiens
  misc_feature: 578 for SV(C|O) and mtDNA
gaccctatatcccccgcccgcgtccctttctccataaaattcttcttagtagctattaccttcttattatttgatctagaaattgccctccttttacccctaccatgagccctacaaaca

SEQ ID NO: 78020 - DNA, 120 bp, Homo sapiens
  misc_feature: 578 for SV(C|O) and mtDNA
gggaaaaaaggcgggagaagccccggcaggtttgaagctgcttcttcgaatttgcaattcaatatgaaaatcacctcggagctggtaaaaagaggcctaacccctgtctttagatttaca

SEQ ID NO: 78021 - DNA, 120 bp, Homo sapiens
  misc_feature: 578 for SV(C|O) and mtDNA
tagtaacagccattctcatccaaaccccctgaagcttcaccggcgcagtcattctcataatcgcccacggacttacatcctcattactattctgcctagcaaactcaaactacgaacgca

SEQ ID NO: 78022 - DNA, 120 bp, Homo sapiens
  misc_feature: 578 for SV(C|O) and mtDNA
gcgtctttgattgtgtagtaagggtggaaggtgattttatcggaatgggaggtgattcctagggggttgtttgatcccgtttcgtgcaagaataggaggtggagtgctgctagggctgca

SEQ ID NO: 78023 - DNA, 120 bp, Homo sapiens
  misc_feature: 578 for SV(C|O) and mtDNA
tcttgcacgaaacgggatcaaacaaccccctaggaatcacctcccattccgataaaatcaccttccacccttactacacaatcaaagacgccctcggcttacttctcttccttctctcct

SEQ ID NO: 78024 - DNA, 120 bp, Homo sapiens
  misc_feature: 578 for SV(C|O) and mtDNA
tcgtccaagtgcactttccagtacacttaccatgttacgacttgtctcctctatataaatgcgtaggggttttagttaaatgtcctttgaagtatacttgaggagggtgacgggcggtgt

SEQ ID NO: 78025 - DNA, 120 bp, Homo sapiens
  misc_feature: 578 for SV(C|O) and mtDNA
tccttgccctattactatccatcctcatcctagcaataatccccatcctccatatatccaaacaacaaagcataatatttcgcccactaagccaatcactttattgactcctagccgcag

SEQ ID NO: 78026 - DNA, 120 bp, Homo sapiens; identical to SEQ ID NO: 59089
  misc_feature: 578 for SV(C|O) and mtDNA

SEQ ID NO: 78027 - DNA, 120 bp, Homo sapiens
  misc_feature: 578 for SV(C|O) and mtDNA
ccactaatccaaactctaacactatgcttaggcgctatcaccactctgttcgcagcagtctgcgcccttacacaaaatgacatcaaaaaaatcgtagccttctccacttcaagtcaacta

SEQ ID NO: 78028 - DNA, 120 bp, Homo sapiens; identical to SEQ ID NO: 60775
  misc_feature: 578 for SV(C|O) and mtDNA

SEQ ID NO: 78029 - DNA, 120 bp, Homo sapiens; identical to SEQ ID NO: 59521
  misc_feature: 578 for SV(C|O) and mtDNA

SEQ ID NO: 78030 - DNA, 120 bp, Homo sapiens; identical to SEQ ID NO: 58625
  misc_feature: 578 for SV(C|O) and mtDNA

SEQ ID NO: 78031 - DNA, 120 bp, Homo sapiens
  misc_feature: 578 for SV(C|O) and mtDNA
catcatcctagtcctcatcgccctcccatccctgcgcatcctttacataacagacgaggtcaacgatccctcccttaccatcaaatcaattggccaccaatggtactgaacctacgagta

SEQ ID NO: 78032 - DNA, 120 bp, Homo sapiens
  misc_feature: 578 for SV(C|O) and mtDNA
tacgtctcgagtgatgtgggcgattgatgaaaaggcggttgaggcgtctggtgagtagtgcatggctaggaatagtcctgtggtgatttggaggatcaggcaggcgccaaggagtgagcc

SEQ ID NO: 78033 - DNA, 120 bp, Homo sapiens
  misc_feature: 578 for SV(C|O) and mtDNA
tacataatgggggtatgagttttttttgttagggttaacgagggtggtaaggatggggggaattagggaagtcagggttagggtggttatagtagtgtgcatggttgttacttttatttg

SEQ ID NO: 78034 - DNA, 120 bp, Homo sapiens
  misc_feature: 578 for SV(C|O) and mtDNA
ccccttccttgtactatccctatgaggcataattataacaagctccatctgcctacgacaaacagacctaaaatcgctcattgcatactcttcaatcagccacatagccctcgtagtaac

SEQ ID NO: 78035 - DNA, 120 bp, Homo sapiens
  misc_feature: 578 for SV(C|O) and mtDNA
ctcataatagttacaatcggcatcaaccaaccacacctagcattcctgcacatctgtacccacgccttcttcaaagccatactatttatgtgctccgggtccatcatccacaaccttaac

SEQ ID NO: 78036 - DNA, 120 bp, Homo sapiens
  misc_feature: 578 for SV(C|O) and mtDNA
gtccaagtgcactttccagtacacttaccatgttacgacttgtctcctctatataaatgcgtaggggttttagttaaatgtcctttgaagtatacttgaggagggtgacgggcggtgtgt

SEQ ID NO: 78037 - DNA, 120 bp, Homo sapiens; identical to SEQ ID NO: 61736
  misc_feature: 578 for SV(C|O) and mtDNA

SEQ ID NO: 78038 - DNA, 120 bp, Homo sapiens
  misc_feature: 578 for SV(C|O) and mtDNA
acaatcaaagacgccctcggcttacttctcttccttctctccttaatgacattaacactattctcaccagacctcctaggcgacccagacaattataccctagccaaccccttaaacacc

SEQ ID NO: 78039 - DNA, 120 bp, Homo sapiens; identical to SEQ ID NO: 62242
  misc_feature: 578 for SV(C|O) and mtDNA

SEQ ID NO: 78040 - DNA, 120 bp, Homo sapiens
  misc_feature: 578 for SV(C|O) and mtDNA
ggggttgttagggggtcggaggaaaaggttggggaacagctaaataggttgttgttgatttggttaaaaaatagtagagggatgatgctaataattaggctgtgggtggttgtgttgatt

SEQ ID NO: 78041 - DNA, 120 bp, Homo sapiens; identical to SEQ ID NO: 62724
  misc_feature: 578 for SV(C|O) and mtDNA

SEQ ID NO: 78042 - DNA, 120 bp, Homo sapiens; identical to SEQ ID NO: 56918
  misc_feature: 578 for SV(C|O) and mtDNA

SEQ ID NO: 78043 - DNA, 120 bp, Homo sapiens; identical to SEQ ID NO: 63039
  misc_feature: 578 for SV(C|O) and mtDNA

SEQ ID NO: 78044 - DNA, 120 bp, Homo sapiens
  misc_feature: 578 for SV(C|O) and mtDNA
cagacctagttcaatgaatctgaggaggctactcagtagacagtcccaccctcacacgattctttacctttcacttcatcttgcccttcattattgcagccctagcagcactccacctcc

SEQ ID NO: 78045 - DNA, 120 bp, Homo sapiens
  misc_feature: 578 for SV(C|O) and mtDNA
ggaggtggagatttggtgctgtgaaattgttttaggtaatagcttttctagtcaggttaggtctaggaggagtaggggcaggttttggctcgtaagaaggcctagataggggattgtgcg

SEQ ID NO: 78046 - DNA, 120 bp, Homo sapiens
  misc_feature: 578 for SV(C|O) and mtDNA
attctcagggatgggttcgattctcatagtcctagaaataagggggtttaagctcctattatttactctatcaaagtaactcttttatcagacatatttcttaggtttgagggggaatgc

SEQ ID NO: 78047 - DNA, 120 bp, Homo sapiens
  misc_feature: 578 for SV(C|O) and mtDNA
gcaactatagcaacagccttcataggctatgtcctcccgtgaggccaaatatcattctgaggggccacagtaattacaaacttactatccgccatcccatacattgggacagacctagtt

SEQ ID NO: 78048 - DNA, 120 bp, Homo sapiens
  misc_feature: 578 for SV(C|O) and mtDNA
ctcctactcctgctcgcatctgctatagtggaggccggagcaggaacaggttgaacagtctaccctcccttagcagggaactactcccaccctggagcctccgtagacctaaccatcttc

SEQ ID NO: 78049 - DNA, 120 bp, Homo sapiens
  misc_feature: 578 for SV(C|O) and mtDNA
ctgtttgcattaataaattaaagctccatagggtcttctcgtcttgctgtgtcatgcccgcctcttcacgggcaggtcaatttcactggttaaaagtaagagacagctgaaccctcgtgg

SEQ ID NO: 78050 - DNA, 120 bp, Homo sapiens
  misc_feature: 578 for SV(C|O) and mtDNA
ctcttcaacaatatactctccggacaatgaaccataaccaatactaccaatcaatactcatcattaataatcataatggctatagcaataaaactaggaatagccccctttcacttctgg

SEQ ID NO: 78051 - DNA, 120 bp, Homo sapiens
  misc_feature: 578 for SV(C|O) and mtDNA
cctttcatgatcacgccctcataatcattttccttatctgcttcctagtcctgtatgcccttttcctaacactcacaacaaaactaactaatactaacatctcagacgctcaggaaatag

SEQ ID NO: 78052 - DNA, 120 bp, Homo sapiens
  misc_feature: 578 for SV(C|O) and mtDNA
ctatcctcttcaacaatatactctccggacaatgaaccataaccaatactaccaatcaatactcatcattaataatcataatggctatagcaataaaactaggaatagccccctttcact

SEQ ID NO: 78053 - DNA, 120 bp, Homo sapiens
  misc_feature: 578 for SV(C|O) and mtDNA
cgtccaagtgcactttccagtacacttaccatgttacgacttgtctcctctatataaatgcgtaggggttttagttaaatgtcctttgaagtatacttgaggagggtgacgggcggtgtg

SEQ ID NO: 78054 - DNA, 120 bp, Homo sapiens; identical to SEQ ID NO: 61892
  misc_feature: 578 for SV(C|O) and mtDNA

SEQ ID NO: 78055 - DNA, 120 bp, Homo sapiens
  misc_feature: 578 for SV(C|O) and mtDNA
caccaatgaccccaatacgcaaaattaaccccctaataaaattaattaaccactcattcatcgacctccccaccccatccaacatctccgcatgatgaaacttcggctcactccttggcg

SEQ ID NO: 78056 - DNA, 120 bp, Homo sapiens
  misc_feature: 578 for SV(C|O) and mtDNA
cctattcttgcacgaaacgggatcaaacaaccccctaggaatcacctcccattccgataaaatcaccttccacccttactacacaatcaaagacgccctcggcttacttctcttccttct

SEQ ID NO: 78057 - DNA, 120 bp, Homo sapiens
  misc_feature: 578 for SV(C|O) and mtDNA
aacaccaatgaccccaatacgcaaaattaaccccctaataaaattaattaaccactcattcatcgacctccccaccccatccaacatctccgcatgatgaaacttcggctcactccttgg

SEQ ID NO: 78058 - DNA, 120 bp, Homo sapiens
  misc_feature: 578 for SV(C|O) and mtDNA
caggcgccaaggagtgagccgaagtttcatcatgcggagatgttggatggggtggggaggtcgatgaatgagtggttaattaattttattagggggttaattttgcgtattggggtcatt

SEQ ID NO: 78059 - DNA, 120 bp, Homo sapiens
  misc_feature: 578 for SV(C|O) and mtDNA
cagcttcctacactattaaagtttaccacaaccaccaccccatcatactctttcacccacagcaccaatcctacctccatcgctaaccccactaaaacactcaccaagacctcaacccct

SEQ ID NO: 78060 - DNA, 120 bp, Homo sapiens
  misc_feature: 578 for SV(C|O) and mtDNA
cacagagagttctcccagtaggttaatagtggggggtaaggcgaggttagcgaggcttgctagaagtcatcaaaaagctattagtgggagtagagtttgaagtccttgagagaggattat

SEQ ID NO: 78061 - DNA, 120 bp, Homo sapiens
  misc_feature: 578 for SV(C|O) and mtDNA
caactccaaataaaagtaacaaccatgcacactactataaccaccctaaccctgacttccctaattccccccatccttaccaccctcgttaaccctaacaaaaaaaactcatacccccat

SEQ ID NO: 78062 - DNA, 120 bp, Homo sapiens
  misc_feature: 578 for SV(C|O) and mtDNA
agtggtaggaagttttttcataggaggtgtatgagttggtcgtagcggaatcgggggtatgctgttcgaattcataagaacagggaggttagaagtagggtcttggtgacaaaatatgtt

SEQ ID NO: 78063 - DNA, 120 bp, Homo sapiens
  misc_feature: 578 for SV(C|O) and mtDNA
aatccaaactctaacactatgcttaggcgctatcaccactctgttcgcagcagtctgcgcccttacacaaaatgacatcaaaaaaatcgtagccttctccacttcaagtcaactaggact

SEQ ID NO: 78064 - DNA, 120 bp, Homo sapiens; identical to SEQ ID NO: 57255
  misc_feature: 577 for SV(C|O) and mtDNA

SEQ ID NO: 78065 - DNA, 120 bp, Homo sapiens; identical to SEQ ID NO: 61812
  misc_feature: 577 for SV(C|O) and mtDNA

SEQ ID NO: 78066 - DNA, 120 bp, Homo sapiens; identical to SEQ ID NO: 56507
  misc_feature: 577 for SV(C|O) and mtDNA

SEQ ID NO: 78067 - DNA, 120 bp, Homo sapiens
  misc_feature: 577 for SV(C|O) and mtDNA
cctcggcttacttctcttccttctctccttaatgacattaacactattctcaccagacctcctaggcgacccagacaattataccctagccaaccccttaaacacccctccccacatcaa

SEQ ID NO: 78068 - DNA, 120 bp, Homo sapiens
  misc_feature: 577 for SV(C|O) and mtDNA
ttcttgcacgaaacgggatcaaacaaccccctaggaatcacctcccattccgataaaatcaccttccacccttactacacaatcaaagacgccctcggcttacttctcttccttctctcc

SEQ ID NO: 78069 - DNA, 120 bp, Homo sapiens
  misc_feature: 577 for SV(C|O) and mtDNA
ttctaacctccctgttcttatgaattcgaacagcatacccccgattccgctacgaccaactcatacacctcctatgaaaaaacttcctaccactcaccctagcattacttatatgatatg

SEQ ID NO: 78070 - DNA, 120 bp, Homo sapiens; identical to SEQ ID NO: 59572
  misc_feature: 577 for SV(C|O) and mtDNA

SEQ ID NO: 78071 - DNA, 120 bp, Homo sapiens
  misc_feature: 577 for SV(C|O) and mtDNA
aagtccttgagagaggattatgatgcgactgtgagtgcgttcgtagtttgagtttgctaggcagaatagtaatgaggatgtaagtccgtgggcgattatgagaatgactgcgccggtgaa

SEQ ID NO: 78072 - DNA, 120 bp, Homo sapiens
  misc_feature: 577 for SV(C|O) and mtDNA
tgtgagtgcgttcgtagtttgagtttgctaggcagaatagtaatgaggatgtaagtccgtgggcgattatgagaatgactgcgccggtgaagcttcagggggtttggatgagaatggctg

SEQ ID NO: 78073 - DNA, 120 bp, Homo sapiens
  misc_feature: 577 for SV(C|O) and mtDNA
tgtctagtgatgagtttgctaatacaatgccagtcaggccgcctacggtgaaaagaaagatgaatcctagggctcagagcactgcagcagatcatttcatattgcttccgtggagtgtgg

SEQ ID NO: 78074 - DNA, 120 bp, Homo sapiens
  misc_feature: 577 for SV(C|O) and mtDNA
ggaggactactcaaaaccatacctctcacttcaacctccctcaccattggcagcctagcattagcaggaatacctttcctcacaggtttctactccaaagaccacatcatcgaaaccgca

SEQ ID NO: 78075 - DNA, 120 bp, Homo sapiens
  misc_feature: 577 for SV(C|O) and mtDNA
gaatcatccgctaccttcacgccaatggcgcctcaatattctttatctgcctcttcctacacatcgggcgaggcctatattacggatcatttctctactcagaaacctgaaacatcggca

SEQ ID NO: 78076 - DNA, 120 bp, Homo sapiens
  misc_feature: 577 for SV(C|O) and mtDNA
tctgggtcccagaggttacccaaggcacccctctgacatccggcctgcttcttctcacatgacaaaaactagcccccatctcaatcatataccaaatctctccctcactaaacgtaagcc

SEQ ID NO: 78077 - DNA, 120 bp, Homo sapiens; identical to SEQ ID NO: 57011
  misc_feature: 577 for SV(C|O) and mtDNA

SEQ ID NO: 78078 - DNA, 120 bp, Homo sapiens
  misc_feature: 577 for SV(C|O) and mtDNA
aagggagggatcgttgacctcgtctgttatgtaaaggatgcgcagggatgggagggcgatgaggactaggatgatggcgggcaggatagttcagacggtttctatttcctgagcgtctga

SEQ ID NO: 78079 - DNA, 120 bp, Homo sapiens; identical to SEQ ID NO: 61350
  misc_feature: 577 for SV(C|O) and mtDNA

SEQ ID NO: 78080 - DNA, 120 bp, Homo sapiens
  misc_feature: 577 for SV(C|O) and mtDNA
tcacacctcatatcctccctactatgcctagaaggaataatactatcactgttcattatagctactctcataaccctcaacacccactccctcttagccaatattgtgcctattgccata

SEQ ID NO: 78081 - DNA, 120 bp, Homo sapiens; identical to SEQ ID NO: 54971
  misc_feature: 577 for SV(C|O) and mtDNA

SEQ ID NO: 78082 - DNA, 120 bp, Homo sapiens
  misc_feature: 577 for SV(C|O) and mtDNA
tatccgccatcccatacattgggacagacctagttcaatgaatctgaggaggctactcagtagacagtcccaccctcacacgattctttacctttcacttcatcttgcccttcattattg

SEQ ID NO: 78083 - DNA, 120 bp, Homo sapiens
  misc_feature: 577 for SV(C|O) and mtDNA
taattatgcctttttgggttgaggtgatgatggaggtggagatttggtgctgtgaaattgttttaggtaatagcttttctagtcaggttaggtctaggaggagtaggggcaggttttggc

SEQ ID NO: 78084 - DNA, 120 bp, Homo sapiens; identical to SEQ ID NO: 62557
  misc_feature: 577 for SV(C|O) and mtDNA

SEQ ID NO: 78085 - DNA, 120 bp, Homo sapiens
  misc_feature: 577 for SV(C|O) and mtDNA
gtttctatctacttcaaattcctccctgtacgaaaggacaagagaaataaggcctacttcacaaagcgccttcccccgtaaatgatatcatctcaacttagtattatacccacacccacc

SEQ ID NO: 78086 - DNA, 120 bp, Homo sapiens; identical to SEQ ID NO: 62236
  misc_feature: 577 for SV(C|O) and mtDNA

SEQ ID NO: 78087 - DNA, 120 bp, Homo sapiens
  misc_feature: 577 for SV(C|O) and mtDNA
gtctaacaacatggctttctcaacttttaaaggataacagctatccattggtcttaggccccaaaaattttggtgcaactccaaataaaagtaacaaccatgcacactactataaccacc

SEQ ID NO: 78088 - DNA, 120 bp, Homo sapiens
  misc_feature: 577 for SV(C|O) and mtDNA
gtagtaacagccattctcatccaaaccccctgaagcttcaccggcgcagtcattctcataatcgcccacggacttacatcctcattactattctgcctagcaaactcaaactacgaacgc

SEQ ID NO: 78089 - DNA, 120 bp, Homo sapiens
  misc_feature: 577 for SV(C|O) and mtDNA
ggtgtggttggttgatgccgattgtaactattatgagtcctagttgacttgaagtggagaaggctacgatttttttgatgtcattttgtgtaagggcgcagactgctgcgaacagagtgg

SEQ ID NO: 78090 - DNA, 120 bp, Homo sapiens
  misc_feature: 577 for SV(C|O) and mtDNA
agtaagctacccttttaccatcattggacaagtagcatccgtactatacttcacaacaatcctaatcctaataccaactatctccctaattgaaaacaaaatactcaaatgggcctgtcc

SEQ ID NO: 78091 - DNA, 120 bp, Homo sapiens; identical to SEQ ID NO: 62855
  misc_feature: 577 for SV(C|O) and mtDNA

SEQ ID NO: 78092 - DNA, 120 bp, Homo sapiens; identical to SEQ ID NO: 58564
  misc_feature: 577 for SV(C|O) and mtDNA

SEQ ID NO: 78093 - DNA, 120 bp, Homo sapiens; identical to SEQ ID NO: 58928
  misc_feature: 577 for SV(C|O) and mtDNA

SEQ ID NO: 78094 - DNA, 120 bp, Homo sapiens
  misc_feature: 577 for SV(C|O) and mtDNA
accaatgaccccaatacgcaaaattaaccccctaataaaattaattaaccactcattcatcgacctccccaccccatccaacatctccgcatgatgaaacttcggctcactccttggcgc

SEQ ID NO: 78095 - DNA, 120 bp, Homo sapiens
  misc_feature: 577 for SV(C|O) and mtDNA
gcataaacaacataagcttctgactcttacctccctctctcctactcctgctcgcatctgctatagtggaggccggagcaggaacaggttgaacagtctaccctcccttagcagggaact

SEQ ID NO: 78096 - DNA, 120 bp, Homo sapiens
  misc_feature: 577 for SV(C|O) and mtDNA
aaaatagactacgaaagtggctttaacatatctgaacacacaatagctaagacccaaactgggattagataccccactatgcttagccctaaacctcaacagttaaatcaacaaaactgc

SEQ ID NO: 78097 - DNA, 120 bp, Homo sapiens
  misc_feature: 577 for SV(C|O) and mtDNA
gcaccctaatcaactggcttcaatctacttctcccgccgccgggaaaaaaggcgggagaagccccggcaggtttgaagctgcttcttcgaatttgcaattcaatatgaaaatcacctcgg

SEQ ID NO: 78098 - DNA, 120 bp, Homo sapiens
  misc_feature: 577 for SV(C|O) and mtDNA
gatgcgactgtgagtgcgttcgtagtttgagtttgctaggcagaatagtaatgaggatgtaagtccgtgggcgattatgagaatgactgcgccggtgaagcttcagggggtttggatgag

SEQ ID NO: 78099 - DNA, 120 bp, Homo sapiens
  misc_feature: 577 for SV(C|O) and mtDNA
gaggattatgatgcgactgtgagtgcgttcgtagtttgagtttgctaggcagaatagtaatgaggatgtaagtccgtgggcgattatgagaatgactgcgccggtgaagcttcagggggt

SEQ ID NO: 78100 - DNA, 120 bp, Homo sapiens; identical to SEQ ID NO: 62860
  misc_feature: 577 for SV(C|O) and mtDNA

SEQ ID NO: 78101 - DNA, 120 bp, Homo sapiens
  misc_feature: 577 for SV(C|O) and mtDNA
gaacaccaatgaccccaatacgcaaaattaaccccctaataaaattaattaaccactcattcatcgacctccccaccccatccaacatctccgcatgatgaaacttcggctcactccttg

SEQ ID NO: 78102 - DNA, 120 bp, Homo sapiens; identical to SEQ ID NO: 63212
  misc_feature: 577 for SV(C|O) and mtDNA

SEQ ID NO: 78103 - DNA, 120 bp, Homo sapiens; identical to SEQ ID NO: 62621
  misc_feature: 577 for SV(C|O) and mtDNA

SEQ ID NO: 78104 - DNA, 120 bp, Homo sapiens
  misc_feature: 577 for SV(C|O) and mtDNA
cttcaacaatatactctccggacaatgaaccataaccaatactaccaatcaatactcatcattaataatcataatggctatagcaataaaactaggaatagccccctttcacttctgggt

SEQ ID NO: 78105 - DNA, 120 bp, Homo sapiens
  misc_feature: 577 for SV(C|O) and mtDNA
cagggatgggttcgattctcatagtcctagaaataagggggtttaagctcctattatttactctatcaaagtaactcttttatcagacatatttcttaggtttgagggggaatgctggag

SEQ ID NO: 78106 - DNA, 120 bp, Homo sapiens; identical to SEQ ID NO: 55917
  misc_feature: 577 for SV(C|O) and mtDNA

SEQ ID NO: 78107 - DNA, 120 bp, Homo sapiens
  misc_feature: 577 for SV(C|O) and mtDNA
ctaggcacatgaatattgttgtggggaagagactgataataaaggtggatgcgacaatggattttacataatgggggtatgagttttttttgttagggttaacgagggtggtaaggatgg

SEQ ID NO: 78108 - DNA, 120 bp, Homo sapiens; identical to SEQ ID NO: 58399
  misc_feature: 577 for SV(C|O) and mtDNA

SEQ ID NO: 78109 - DNA, 120 bp, Homo sapiens; identical to SEQ ID NO: 59858
  misc_feature: 577 for SV(C|O) and mtDNA

SEQ ID NO: 78110 - DNA, 120 bp, Homo sapiens
  misc_feature: 577 for SV(C|O) and mtDNA
aggcacatgaatattgttgtggggaagagactgataataaaggtggatgcgacaatggattttacataatgggggtatgagttttttttgttagggttaacgagggtggtaaggatgggg

SEQ ID NO: 78111 - DNA, 120 bp, Homo sapiens
  misc_feature: 577 for SV(C|O) and mtDNA
caaaatagactacgaaagtggctttaacatatctgaacacacaatagctaagacccaaactgggattagataccccactatgcttagccctaaacctcaacagttaaatcaacaaaactg

SEQ ID NO: 78112 - DNA, 120 bp, Homo sapiens
  misc_feature: 577 for SV(C|O) and mtDNA
atgggtttaatagtttttttaatttatttagggggaatgatggttgtctttggatatactacagcgatggctattgaggagtatcctgaggcatgggggtcaggggttgaggtcttggtg

SEQ ID NO: 78113 - DNA, 120 bp, Homo sapiens
  misc_feature: 577 for SV(C|O) and mtDNA
actactcaaaaccatacctctcacttcaacctccctcaccattggcagcctagcattagcaggaatacctttcctcacaggtttctactccaaagaccacatcatcgaaaccgcaaacat

SEQ ID NO: 78114 - DNA, 120 bp, Homo sapiens
  misc_feature: 577 for SV(C|O) and mtDNA
aatcatccgctaccttcacgccaatggcgcctcaatattctttatctgcctcttcctacacatcgggcgaggcctatattacggatcatttctctactcagaaacctgaaacatcggcat

SEQ ID NO: 78115 - DNA, 120 bp, Homo sapiens; identical to SEQ ID NO: 59060
  misc_feature: 576 for SV(C|O) and mtDNA

SEQ ID NO: 78116 - DNA, 120 bp, Homo sapiens; identical to SEQ ID NO: 58907
  misc_feature: 576 for SV(C|O) and mtDNA

SEQ ID NO: 78117 - DNA, 120 bp, Homo sapiens
  misc_feature: 576 for SV(C|O) and mtDNA
ttcaacaatatactctccggacaatgaaccataaccaatactaccaatcaatactcatcattaataatcataatggctatagcaataaaactaggaatagccccctttcacttctgggtc

SEQ ID NO: 78118 - DNA, 120 bp, Homo sapiens
  misc_feature: 576 for SV(C|O) and mtDNA
tgtgttattattctgaattttgggggaggttatatgggtttaatagtttttttaatttatttagggggaatgatggttgtctttggatatactacagcgatggctattgaggagtatcct

SEQ ID NO: 78119 - DNA, 120 bp, Homo sapiens; identical to SEQ ID NO: 59162
  misc_feature: 576 for SV(C|O) and mtDNA

SEQ ID NO: 78120 - DNA, 120 bp, Homo sapiens
  misc_feature: 576 for SV(C|O) and mtDNA
gtcaccaagaccctacttctaacctccctgttcttatgaattcgaacagcatacccccgattccgctacgaccaactcatacacctcctatgaaaaaacttcctaccactcaccctagca

SEQ ID NO: 78121 - DNA, 120 bp, Homo sapiens
  misc_feature: 576 for SV(C|O) and mtDNA
tcttcaacaatatactctccggacaatgaaccataaccaatactaccaatcaatactcatcattaataatcataatggctatagcaataaaactaggaatagccccctttcacttctggg

SEQ ID NO: 78122 - DNA, 120 bp, Homo sapiens
  misc_feature: 576 for SV(C|O) and mtDNA
caatatactctccggacaatgaaccataaccaatactaccaatcaatactcatcattaataatcataatggctatagcaataaaactaggaatagccccctttcacttctgggtcccaga

SEQ ID NO: 78123 - DNA, 120 bp, Homo sapiens; identical to SEQ ID NO: 54969
  misc_feature: 576 for SV(C|O) and mtDNA

SEQ ID NO: 78124 - DNA, 120 bp, Homo sapiens; identical to SEQ ID NO: 61755
  misc_feature: 576 for SV(C|O) and mtDNA

SEQ ID NO: 78125 - DNA, 120 bp, Homo sapiens
  misc_feature: 576 for SV(C|O) and mtDNA
tatactctccggacaatgaaccataaccaatactaccaatcaatactcatcattaataatcataatggctatagcaataaaactaggaatagccccctttcacttctgggtcccagaggt

SEQ ID NO: 78126 - DNA, 120 bp, Homo sapiens
  misc_feature: 576 for SV(C|O) and mtDNA
actacgaacgcactcacagtcgcatcataatcctctctcaaggacttcaaactctactcccactaatagctttttgatgacttctagcaagcctcgctaacctcgccttaccccccacta

SEQ ID NO: 78127 - DNA, 120 bp, Homo sapiens; identical to SEQ ID NO: 58917
  misc_feature: 576 for SV(C|O) and mtDNA

SEQ ID NO: 78128 - DNA, 120 bp, Homo sapiens
  misc_feature: 576 for SV(C|O) and mtDNA
taccccccactattaacctactgggagaactctctgtgctagtaaccacgttctcctgatcaaatatcactctcctacttacaggactcaacatactagtcacagccctatactccctct

SEQ ID NO: 78129 - DNA, 120 bp, Homo sapiens
  misc_feature: 576 for SV(C|O) and mtDNA
gtggtaggaagttttttcataggaggtgtatgagttggtcgtagcggaatcgggggtatgctgttcgaattcataagaacagggaggttagaagtagggtcttggtgacaaaatatgttg

SEQ ID NO: 78130 - DNA, 120 bp, Homo sapiens
  misc_feature: 576 for SV(C|O) and mtDNA
acaaaaaaaactcatacccccattatgtaaaatccattgtcgcatccacctttattatcagtctcttccccacaacaatattcatgtgcctagaccaagaagttattatctcgaactgac

SEQ ID NO: 78131 - DNA, 120 bp, Homo sapiens; identical to SEQ ID NO: 62979
  misc_feature: 576 for SV(C|O) and mtDNA

SEQ ID NO: 78132 - DNA, 120 bp, Homo sapiens
  misc_feature: 576 for SV(C|O) and mtDNA
ggcgtctttgattgtgtagtaagggtggaaggtgattttatcggaatgggaggtgattcctagggggttgtttgatcccgtttcgtgcaagaataggaggtggagtgctgctagggctgc

SEQ ID NO: 78133 - DNA, 120 bp, Homo sapiens
  misc_feature: 576 for SV(C|O) and mtDNA
ggcacatgaatattgttgtggggaagagactgataataaaggtggatgcgacaatggattttacataatgggggtatgagttttttttgttagggttaacgagggtggtaaggatggggg

SEQ ID NO: 78134 - DNA, 120 bp, Homo sapiens
  misc_feature: 576 for SV(C|O) and mtDNA
ccctctacatatttaccacaacacaatggggctcactcacccaccacattaacaacataaaaccctcattcacacgagaaaacaccctcatgttcatacacctatcccccattctcctcc

SEQ ID NO: 78135 - DNA, 120 bp, Homo sapiens; identical to SEQ ID NO: 57576
  misc_feature: 576 for SV(C|O) and mtDNA

SEQ ID NO: 78136 - DNA, 120 bp, Homo sapiens
  misc_feature: 576 for SV(C|O) and mtDNA
acggtagtatttagttggggcatttcactgtaaagaggtgttggttctcttaatctttaacttaaaaggttaatgctaagttagctttacagtgggctctagagggggtagagggggtgc

SEQ ID NO: 78137 - DNA, 120 bp, Homo sapiens; identical to SEQ ID NO: 61978
  misc_feature: 576 for SV(C|O) and mtDNA

SEQ ID NO: 78138 - DNA, 120 bp, Homo sapiens
  misc_feature: 576 for SV(C|O) and mtDNA
aacctccctgttcttatgaattcgaacagcatacccccgattccgctacgaccaactcatacacctcctatgaaaaaacttcctaccactcaccctagcattacttatatgatatgtctc

SEQ ID NO: 78139 - DNA, 120 bp, Homo sapiens
  misc_feature: 576 for SV(C|O) and mtDNA
atagcccactaatccaaactctaacactatgcttaggcgctatcaccactctgttcgcagcagtctgcgcccttacacaaaatgacatcaaaaaaatcgtagccttctccacttcaagtc

SEQ ID NO: 78140 - DNA, 120 bp, Homo sapiens
  misc_feature: 576 for SV(C|O) and mtDNA
cttccttctctccttaatgacattaacactattctcaccagacctcctaggcgacccagacaattataccctagccaaccccttaaacacccctccccacatcaagcccgaatgatattt

SEQ ID NO: 78141 - DNA, 120 bp, Homo sapiens; identical to SEQ ID NO: 54266
  misc_feature: 576 for SV(C|O) and mtDNA

SEQ ID NO: 78142 - DNA, 120 bp, Homo sapiens
  misc_feature: 576 for SV(C|O) and mtDNA
cctaccccttccttgtactatccctatgaggcataattataacaagctccatctgcctacgacaaacagacctaaaatcgctcattgcatactcttcaatcagccacatagccctcgtag

SEQ ID NO: 78143 - DNA, 120 bp, Homo sapiens
  misc_feature: 576 for SV(C|O) and mtDNA
cgtctgatccgtcctaatcacagcagtcctacttctcctatctctcccagtcctagctgctggcatcactatactactaacagaccgcaacctcaacaccaccttcttcgaccccgccgg

SEQ ID NO: 78144 - DNA, 120 bp, Homo sapiens; identical to SEQ ID NO: 57025
  misc_feature: 576 for SV(C|O) and mtDNA

SEQ ID NO: 78145 - DNA, 120 bp, Homo sapiens
  misc_feature: 576 for SV(C|O) and mtDNA
catacggtagtatttagttggggcatttcactgtaaagaggtgttggttctcttaatctttaacttaaaaggttaatgctaagttagctttacagtgggctctagagggggtagaggggg

SEQ ID NO: 78146 - DNA, 120 bp, Homo sapiens; identical to SEQ ID NO: 55920
  misc_feature: 576 for SV(C|O) and mtDNA

SEQ ID NO: 78147 - DNA, 120 bp, Homo sapiens
  misc_feature: 576 for SV(C|O) and mtDNA
atgacccccctcagataggggtcccttgaccaccatcctccgtgaaatcaatatcccgcacaagagtgctactctcctcgctccgggcccataacacttgggggtagctaaagtgaactg

SEQ ID NO: 78148 - DNA, 120 bp, Homo sapiens
  misc_feature: 576 for SV(C|O) and mtDNA
aagaataggaggtggagtgctgctagggctgcaataatgaagggcaagatgaagtgaaaggtaaagaatcgtgtgagggtgggactgtctactgagtagcctcctcagattcattgaact

SEQ ID NO: 78149 - DNA, 120 bp, Homo sapiens
  misc_feature: 576 for SV(C|O) and mtDNA
agctacccttttaccatcattggacaagtagcatccgtactatacttcacaacaatcctaatcctaataccaactatctccctaattgaaaacaaaatactcaaatgggcctgtccttgt

SEQ ID NO: 78150 - DNA, 120 bp, Homo sapiens
  misc_feature: 576 for SV(C|O) and mtDNA
aagtttatattcttatcctaccaggcttcggaataatctcccatattgtaacttactactccggaaaaaaagaaccatttggatacataggtatggtctgagctatgatatcaattggct

SEQ ID NO: 78151 - DNA, 120 bp, Homo sapiens
  misc_feature: 576 for SV(C|O) and mtDNA
agcagcagcaggcaaatcagcccaattaggtctccacccctgactcccctcagccatagaaggccccaccccagtctcagccctactccactcaagcactatagttgtagcaggaatctt

SEQ ID NO: 78152 - DNA, 120 bp, Homo sapiens
  misc_feature: 575 for SV(C|O) and mtDNA
gacctgcgactccttgacgttgacaatcgagtagtactcccgattgaagcccccattcgtataataattacatcacaagacgtcttgcactcatgagctgtccccacattaggcttaaaa

SEQ ID NO: 78153 - DNA, 120 bp, Homo sapiens
  misc_feature: 575 for SV(C|O) and mtDNA
tttacataatgggggtatgagttttttttgttagggttaacgagggtggtaaggatggggggaattagggaagtcagggttagggtggttatagtagtgtgcatggttgttacttttatt

SEQ ID NO: 78154 - DNA, 120 bp, Homo sapiens
  misc_feature: 575 for SV(C|O) and mtDNA
cataatagttacaatcggcatcaaccaaccacacctagcattcctgcacatctgtacccacgccttcttcaaagccatactatttatgtgctccgggtccatcatccacaaccttaacaa

SEQ ID NO: 78155 - DNA, 120 bp, Homo sapiens
  misc_feature: 575 for SV(C|O) and mtDNA
ttcagcttcctacactattaaagtttaccacaaccaccaccccatcatactctttcacccacagcaccaatcctacctccatcgctaaccccactaaaacactcaccaagacctcaaccc

SEQ ID NO: 78156 - DNA, 120 bp, Homo sapiens
  misc_feature: 575 for SV(C|O) and mtDNA
tgtccaaaaaggccttcgatacgggataatcctatttattacctcagaagtttttttcttcgcaggatttttctgagccttttaccactccagcctagcccctaccccccaattaggagg

SEQ ID NO: 78157 - DNA, 120 bp, Homo sapiens
  misc_feature: 575 for SV(C|O) and mtDNA
tggaggtggagatttggtgctgtgaaattgttttaggtaatagcttttctagtcaggttaggtctaggaggagtaggggcaggttttggctcgtaagaaggcctagataggggattgtgc

SEQ ID NO: 78158 - DNA, 120 bp, Homo sapiens
  misc_feature: 575 for SV(C|O) and mtDNA
gacttctagcaagcctcgctaacctcgccttaccccccactattaacctactgggagaactctctgtgctagtaaccacgttctcctgatcaaatatcactctcctacttacaggactca

SEQ ID NO: 78159 - DNA, 120 bp, Homo sapiens
  misc_feature: 575 for SV(C|O) and mtDNA
tctagtgatgagtttgctaatacaatgccagtcaggccgcctacggtgaaaagaaagatgaatcctagggctcagagcactgcagcagatcatttcatattgcttccgtggagtgtggcg

SEQ ID NO: 78160 - DNA, 120 bp, Homo sapiens
  misc_feature: 575 for SV(C|O) and mtDNA
tcctgtatgcccttttcctaacactcacaacaaaactaactaatactaacatctcagacgctcaggaaatagaaaccgtctgaactatcctgcccgccatcatcctagtcctcatcgccc

SEQ ID NO: 78161 - DNA, 120 bp, Homo sapiens; identical to SEQ ID NO: 55616
  misc_feature: 575 for SV(C|O) and mtDNA

SEQ ID NO: 78162 - DNA, 120 bp, Homo sapiens
  misc_feature: 575 for SV(C|O) and mtDNA
tcaaactacgaacgcactcacagtcgcatcataatcctctctcaaggacttcaaactctactcccactaatagctttttgatgacttctagcaagcctcgctaacctcgccttacccccc

SEQ ID NO: 78163 - DNA, 120 bp, Homo sapiens
  misc_feature: 575 for SV(C|O) and mtDNA
tcaaaaccatacctctcacttcaacctccctcaccattggcagcctagcattagcaggaatacctttcctcacaggtttctactccaaagaccacatcatcgaaaccgcaaacatatcat

SEQ ID NO: 78164 - DNA, 120 bp, Homo sapiens
  misc_feature: 575 for SV(C|O) and mtDNA
accctacttctaacctccctgttcttatgaattcgaacagcatacccccgattccgctacgaccaactcatacacctcctatgaaaaaacttcctaccactcaccctagcattacttata

SEQ ID NO: 78165 - DNA, 120 bp, Homo sapiens
  misc_feature: 575 for SV(C|O) and mtDNA
cacctcatatcctccctactatgcctagaaggaataatactatcactgttcattatagctactctcataaccctcaacacccactccctcttagccaatattgtgcctattgccatacta

SEQ ID NO: 78166 - DNA, 120 bp, Homo sapiens
  misc_feature: 575 for SV(C|O) and mtDNA
ctatcactgttcattatagctactctcataaccctcaacacccactccctcttagccaatattgtgcctattgccatactagtctttgccgcctgcgaagcagcggtgggcctagcccta

SEQ ID NO: 78167 - DNA, 120 bp, Homo sapiens
  misc_feature: 575 for SV(C|O) and mtDNA
tagcacagagagttctcccagtaggttaatagtggggggtaaggcgaggttagcgaggcttgctagaagtcatcaaaaagctattagtgggagtagagtttgaagtccttgagagaggat

SEQ ID NO: 78168 - DNA, 120 bp, Homo sapiens; identical to SEQ ID NO: 62727
  misc_feature: 575 for SV(C|O) and mtDNA

SEQ ID NO: 78169 - DNA, 120 bp, Homo sapiens; identical to SEQ ID NO: 62629
  misc_feature: 575 for SV(C|O) and mtDNA

SEQ ID NO: 78170 - DNA, 120 bp, Homo sapiens; identical to SEQ ID NO: 60573
  misc_feature: 575 for SV(C|O) and mtDNA

SEQ ID NO: 78171 - DNA, 120 bp, Homo sapiens
  misc_feature: 575 for SV(C|O) and mtDNA
gtaagggagggatcgttgacctcgtctgttatgtaaaggatgcgcagggatgggagggcgatgaggactaggatgatggcgggcaggatagttcagacggtttctatttcctgagcgtct

SEQ ID NO: 78172 - DNA, 120 bp, Homo sapiens; identical to SEQ ID NO: 60092
  misc_feature: 575 for SV(C|O) and mtDNA

SEQ ID NO: 78173 - DNA, 120 bp, Homo sapiens
  misc_feature: 575 for SV(C|O) and mtDNA
gggtgtgttattattctgaattttgggggaggttatatgggtttaatagtttttttaatttatttagggggaatgatggttgtctttggatatactacagcgatggctattgaggagtat

SEQ ID NO: 78174 - DNA, 120 bp, Homo sapiens
  misc_feature: 575 for SV(C|O) and mtDNA
ccacacaccacctgtccaaaaaggccttcgatacgggataatcctatttattacctcagaagtttttttcttcgcaggatttttctgagccttttaccactccagcctagcccctacccc

SEQ ID NO: 78175 - DNA, 120 bp, Homo sapiens
  misc_feature: 575 for SV(C|O) and mtDNA
atctcagacgctcaggaaatagaaaccgtctgaactatcctgcccgccatcatcctagtcctcatcgccctcccatccctgcgcatcctttacataacagacgaggtcaacgatccctcc

SEQ ID NO: 78176 - DNA, 120 bp, Homo sapiens; identical to SEQ ID NO: 59694
  misc_feature: 575 for SV(C|O) and mtDNA

SEQ ID NO: 78177 - DNA, 120 bp, Homo sapiens
  misc_feature: 575 for SV(C|O) and mtDNA
cttgagagaggattatgatgcgactgtgagtgcgttcgtagtttgagtttgctaggcagaatagtaatgaggatgtaagtccgtgggcgattatgagaatgactgcgccggtgaagcttc

SEQ ID NO: 78178 - DNA, 120 bp, Homo sapiens
  misc_feature: 575 for SV(C|O) and mtDNA
catcgtcctagaattaattcccctaaaaatctttgaaatagggcccgtatttaccctatagcaccccctctaccccctctagagcccactgtaaagctaacttagcattaaccttttaag

SEQ ID NO: 78179 - DNA, 120 bp, Homo sapiens
  misc_feature: 575 for SV(C|O) and mtDNA
ctcttccttctctccttaatgacattaacactattctcaccagacctcctaggcgacccagacaattataccctagccaaccccttaaacacccctccccacatcaagcccgaatgatat

SEQ ID NO: 78180 - DNA, 120 bp, Homo sapiens
  misc_feature: 575 for SV(C|O) and mtDNA
atatactctccggacaatgaaccataaccaatactaccaatcaatactcatcattaataatcataatggctatagcaataaaactaggaatagccccctttcacttctgggtcccagagg

SEQ ID NO: 78181 - DNA, 120 bp, Homo sapiens
  misc_feature: 575 for SV(C|O) and mtDNA
ccatacggtagtatttagttggggcatttcactgtaaagaggtgttggttctcttaatctttaacttaaaaggttaatgctaagttagctttacagtgggctctagagggggtagagggg

SEQ ID NO: 78182 - DNA, 120 bp, Homo sapiens
  misc_feature: 575 for SV(C|O) and mtDNA
attatgatgcgactgtgagtgcgttcgtagtttgagtttgctaggcagaatagtaatgaggatgtaagtccgtgggcgattatgagaatgactgcgccggtgaagcttcagggggtttgg

SEQ ID NO: 78183 - DNA, 120 bp, Homo sapiens
  misc_feature: 575 for SV(C|O) and mtDNA
aacaaccgctatgtaattcgtacattactgccagccaccatgaatattgtacggtaccataaatacttgaccacctgtagtacataaaaacccaatccacatcaaaaccccctccccatg

SEQ ID NO: 78184 - DNA, 120 bp, Homo sapiens
  misc_feature: 575 for SV(C|O) and mtDNA
caggttttggctcgtaagaaggcctagataggggattgtgcggtgtgtgatggtagggtagaatccgagtatgttggagaaataaaatgtgcatagtggggattttattttaagtttgtt

SEQ ID NO: 78185 - DNA, 120 bp, Homo sapiens
  misc_feature: 575 for SV(C|O) and mtDNA
agcttcctacactattaaagtttaccacaaccaccaccccatcatactctttcacccacagcaccaatcctacctccatcgctaaccccactaaaacactcaccaagacctcaacccctg

SEQ ID NO: 78186 - DNA, 120 bp, Homo sapiens
  misc_feature: 575 for SV(C|O) and mtDNA
caaccgctatgtaattcgtacattactgccagccaccatgaatattgtacggtaccataaatacttgaccacctgtagtacataaaaacccaatccacatcaaaaccccctccccatgct

SEQ ID NO: 78187 - DNA, 120 bp, Homo sapiens
  misc_feature: 575 for SV(C|O) and mtDNA
agcctaccccttccttgtactatccctatgaggcataattataacaagctccatctgcctacgacaaacagacctaaaatcgctcattgcatactcttcaatcagccacatagccctcgt

SEQ ID NO: 78188 - DNA, 120 bp, Homo sapiens
  misc_feature: 574 for SV(C|O) and mtDNA
tttgatgacttctagcaagcctcgctaacctcgccttaccccccactattaacctactgggagaactctctgtgctagtaaccacgttctcctgatcaaatatcactctcctacttacag

SEQ ID NO: 78189 - DNA, 120 bp, Homo sapiens
  misc_feature: 574 for SV(C|O) and mtDNA
aaataggaggactactcaaaaccatacctctcacttcaacctccctcaccattggcagcctagcattagcaggaatacctttcctcacaggtttctactccaaagaccacatcatcgaaa

SEQ ID NO: 78190 - DNA, 120 bp, Homo sapiens
  misc_feature: 574 for SV(C|O) and mtDNA
cgacctgcgactccttgacgttgacaatcgagtagtactcccgattgaagcccccattcgtataataattacatcacaagacgtcttgcactcatgagctgtccccacattaggcttaaa

SEQ ID NO: 78191 - DNA, 120 bp, Homo sapiens
  misc_feature: 574 for SV(C|O) and mtDNA
accctatatcccccgcccgcgtccctttctccataaaattcttcttagtagctattaccttcttattatttgatctagaaattgccctccttttacccctaccatgagccctacaaacaa

SEQ ID NO: 78192 - DNA, 120 bp, Homo sapiens
  misc_feature: 574 for SV(C|O) and mtDNA
ttggtctaggcacatgaatattgttgtggggaagagactgataataaaggtggatgcgacaatggattttacataatgggggtatgagttttttttgttagggttaacgagggtggtaag

SEQ ID NO: 78193 - DNA, 120 bp, Homo sapiens; identical to SEQ ID NO: 57432
  misc_feature: 574 for SV(C|O) and mtDNA

SEQ ID NO: 78194 - DNA, 120 bp, Homo sapiens
  misc_feature: 574 for SV(C|O) and mtDNA
ttgatgacttctagcaagcctcgctaacctcgccttaccccccactattaacctactgggagaactctctgtgctagtaaccacgttctcctgatcaaatatcactctcctacttacagg

SEQ ID NO: 78195 - DNA, 120 bp, Homo sapiens
  misc_feature: 574 for SV(C|O) and mtDNA
tgggtcttagctattgtgtgttcagatatgttaaagccactttcgtagtctattttgtgtcagctggagttttttacaactcaggtgagttttagctttattggggagggggtgatctaa

SEQ ID NO: 78196 - DNA, 120 bp, Homo sapiens
  misc_feature: 574 for SV(C|O) and mtDNA
caaaaaaaactcatacccccattatgtaaaatccattgtcgcatccacctttattatcagtctcttccccacaacaatattcatgtgcctagaccaagaagttattatctcgaactgaca

SEQ ID NO: 78197 - DNA, 120 bp, Homo sapiens
  misc_feature: 574 for SV(C|O) and mtDNA
caaactacgaacgcactcacagtcgcatcataatcctctctcaaggacttcaaactctactcccactaatagctttttgatgacttctagcaagcctcgctaacctcgccttacccccca

SEQ ID NO: 78198 - DNA, 120 bp, Homo sapiens
  misc_feature: 574 for SV(C|O) and mtDNA
tagcagaaaatagcccactaatccaaactctaacactatgcttaggcgctatcaccactctgttcgcagcagtctgcgcccttacacaaaatgacatcaaaaaaatcgtagccttctcca

SEQ ID NO: 78199 - DNA, 120 bp, Homo sapiens; identical to SEQ ID NO: 55590
  misc_feature: 574 for SV(C|O) and mtDNA

SEQ ID NO: 78200 - DNA, 120 bp, Homo sapiens
  misc_feature: 574 for SV(C|O) and mtDNA
tccgccatcccatacattgggacagacctagttcaatgaatctgaggaggctactcagtagacagtcccaccctcacacgattctttacctttcacttcatcttgcccttcattattgca

SEQ ID NO: 78201 - DNA, 120 bp, Homo sapiens
  misc_feature: 574 for SV(C|O) and mtDNA
ccctcggcttacttctcttccttctctccttaatgacattaacactattctcaccagacctcctaggcgacccagacaattataccctagccaaccccttaaacacccctccccacatca

SEQ ID NO: 78202 - DNA, 120 bp, Homo sapiens
  misc_feature: 574 for SV(C|O) and mtDNA
ctttcatgatcacgccctcataatcattttccttatctgcttcctagtcctgtatgcccttttcctaacactcacaacaaaactaactaatactaacatctcagacgctcaggaaataga

SEQ ID NO: 78203 - DNA, 120 bp, Homo sapiens; identical to SEQ ID NO: 59317
  misc_feature: 574 for SV(C|O) and mtDNA

SEQ ID NO: 78204 - DNA, 120 bp, Homo sapiens
  misc_feature: 574 for SV(C|O) and mtDNA
ctagtgatgagtttgctaatacaatgccagtcaggccgcctacggtgaaaagaaagatgaatcctagggctcagagcactgcagcagatcatttcatattgcttccgtggagtgtggcga

SEQ ID NO: 78205 - DNA, 120 bp, Homo sapiens; identical to SEQ ID NO: 58283
  misc_feature: 574 for SV(C|O) and mtDNA

SEQ ID NO: 78206 - DNA, 120 bp, Homo sapiens
  misc_feature: 574 for SV(C|O) and mtDNA
agaataggaggtggagtgctgctagggctgcaataatgaagggcaagatgaagtgaaaggtaaagaatcgtgtgagggtgggactgtctactgagtagcctcctcagattcattgaacta

SEQ ID NO: 78207 - DNA, 120 bp, Homo sapiens
  misc_feature: 574 for SV(C|O) and mtDNA
ggcaagatgaagtgaaaggtaaagaatcgtgtgagggtgggactgtctactgagtagcctcctcagattcattgaactaggtctgtcccaatgtatgggatggcggatagtaagtttgta

SEQ ID NO: 78208 - DNA, 120 bp, Homo sapiens
  misc_feature: 574 for SV(C|O) and mtDNA
taatccaaactctaacactatgcttaggcgctatcaccactctgttcgcagcagtctgcgcccttacacaaaatgacatcaaaaaaatcgtagccttctccacttcaagtcaactaggac

SEQ ID NO: 78209 - DNA, 120 bp, Homo sapiens
  misc_feature: 574 for SV(C|O) and mtDNA
cgtcctagaattaattcccctaaaaatctttgaaatagggcccgtatttaccctatagcaccccctctaccccctctagagcccactgtaaagctaacttagcattaaccttttaagtta

SEQ ID NO: 78210 - DNA, 120 bp, Homo sapiens
  misc_feature: 574 for SV(C|O) and mtDNA
gttagcttgtttcaggtgcgagatagtagtagggtcgtggtgctggagtttaagttgagtagtaggaatgcggtagtagttaggataatataaatagttaaattaagaatggttatgtta

SEQ ID NO: 78211 - DNA, 120 bp, Homo sapiens
  misc_feature: 574 for SV(C|O) and mtDNA
gtgtgttattattctgaattttgggggaggttatatgggtttaatagtttttttaatttatttagggggaatgatggttgtctttggatatactacagcgatggctattgaggagtatcc

SEQ ID NO: 78212 - DNA, 120 bp, Homo sapiens
  misc_feature: 574 for SV(C|O) and mtDNA
acagccattctcatccaaaccccctgaagcttcaccggcgcagtcattctcataatcgcccacggacttacatcctcattactattctgcctagcaaactcaaactacgaacgcactcac

SEQ ID NO: 78213 - DNA, 120 bp, Homo sapiens
  misc_feature: 574 for SV(C|O) and mtDNA
ccaagaccctacttctaacctccctgttcttatgaattcgaacagcatacccccgattccgctacgaccaactcatacacctcctatgaaaaaacttcctaccactcaccctagcattac

SEQ ID NO: 78214 - DNA, 120 bp, Homo sapiens
  misc_feature: 574 for SV(C|O) and mtDNA
attcagcttcctacactattaaagtttaccacaaccaccaccccatcatactctttcacccacagcaccaatcctacctccatcgctaaccccactaaaacactcaccaagacctcaacc

SEQ ID NO: 78215 - DNA, 120 bp, Homo sapiens; identical to SEQ ID NO: 62750
  misc_feature: 574 for SV(C|O) and mtDNA

SEQ ID NO: 78216 - DNA, 120 bp, Homo sapiens; identical to SEQ ID NO: 59722
  misc_feature: 574 for SV(C|O) and mtDNA

SEQ ID NO: 78217 - DNA, 120 bp, Homo sapiens
  misc_feature: 574 for SV(C|O) and mtDNA
cctctacctaaaactcacagccctcgctgtcactttcctaggacttctaacagccctagacctcaactacctaaccaacaaacttaaaataaaatccccactatgcacattttatttctc

SEQ ID NO: 78218 - DNA, 120 bp, Homo sapiens; identical to SEQ ID NO: 56524
  misc_feature: 574 for SV(C|O) and mtDNA

SEQ ID NO: 78219 - DNA, 120 bp, Homo sapiens; identical to SEQ ID NO: 57088
  misc_feature: 574 for SV(C|O) and mtDNA

SEQ ID NO: 78220 - DNA, 120 bp, Homo sapiens
  misc_feature: 574 for SV(C|O) and mtDNA
ataatttacgtctcgagtgatgtgggcgattgatgaaaaggcggttgaggcgtctggtgagtagtgcatggctaggaatagtcctgtggtgatttggaggatcaggcaggcgccaaggag

SEQ ID NO: 78221 - DNA, 120 bp, Homo sapiens
  misc_feature: 574 for SV(C|O) and mtDNA
cgacccagacaattataccctagccaaccccttaaacacccctccccacatcaagcccgaatgatatttcctattcgcctacacaattctccgatccgtccctaacaaactaggaggcgt

SEQ ID NO: 78222 - DNA, 120 bp, Homo sapiens
  misc_feature: 574 for SV(C|O) and mtDNA
catgaatattgttgtggggaagagactgataataaaggtggatgcgacaatggattttacataatgggggtatgagttttttttgttagggttaacgagggtggtaaggatggggggaat

SEQ ID NO: 78223 - DNA, 120 bp, Homo sapiens
  misc_feature: 574 for SV(C|O) and mtDNA
agtattgactcacccatcaacaaccgctatgtaattcgtacattactgccagccaccatgaatattgtacggtaccataaatacttgaccacctgtagtacataaaaacccaatccacat

SEQ ID NO: 78224 - DNA, 120 bp, Homo sapiens; identical to SEQ ID NO: 62705
  misc_feature: 574 for SV(C|O) and mtDNA

SEQ ID NO: 78225 - DNA, 120 bp, Homo sapiens
  misc_feature: 574 for SV(C|O) and mtDNA
acacctcatatcctccctactatgcctagaaggaataatactatcactgttcattatagctactctcataaccctcaacacccactccctcttagccaatattgtgcctattgccatact

SEQ ID NO: 78226 - DNA, 120 bp, Homo sapiens
  misc_feature: 574 for SV(C|O) and mtDNA
agcacagagagttctcccagtaggttaatagtggggggtaaggcgaggttagcgaggcttgctagaagtcatcaaaaagctattagtgggagtagagtttgaagtccttgagagaggatt

SEQ ID NO: 78227 - DNA, 120 bp, Homo sapiens
  misc_feature: 573 for SV(C|O) and mtDNA
tttcatgatcacgccctcataatcattttccttatctgcttcctagtcctgtatgcccttttcctaacactcacaacaaaactaactaatactaacatctcagacgctcaggaaatagaa

SEQ ID NO: 78228 - DNA, 120 bp, Homo sapiens
  misc_feature: 573 for SV(C|O) and mtDNA
tttcacttctgggtcccagaggttacccaaggcacccctctgacatccggcctgcttcttctcacatgacaaaaactagcccccatctcaatcatataccaaatctctccctcactaaac

SEQ ID NO: 78229 - DNA, 120 bp, Homo sapiens
  misc_feature: 573 for SV(C|O) and mtDNA
ggggacagctcatgagtgcaagacgtcttgtgatgtaattattatacgaatgggggcttcaatcgggagtactactcgattgtcaacgtcaaggagtcgcaggtcgcctggttctaggaa

SEQ ID NO: 78230 - DNA, 120 bp, Homo sapiens; identical to SEQ ID NO: 60561
  misc_feature: 573 for SV(C|O) and mtDNA

SEQ ID NO: 78231 - DNA, 120 bp, Homo sapiens
  misc_feature: 573 for SV(C|O) and mtDNA
gactactcaaaaccatacctctcacttcaacctccctcaccattggcagcctagcattagcaggaatacctttcctcacaggtttctactccaaagaccacatcatcgaaaccgcaaaca

SEQ ID NO: 78232 - DNA, 120 bp, Homo sapiens; identical to SEQ ID NO: 55802
  misc_feature: 573 for SV(C|O) and mtDNA

SEQ ID NO: 78233 - DNA, 120 bp, Homo sapiens
  misc_feature: 573 for SV(C|O) and mtDNA
gaactgacaattaacagcccaatatctacaatcaaccaacaagtcattattaccctcactgtcaacccaacacaggcatgctcataaggaaaggttaaaaaaagtaaaaggaactcggca

SEQ ID NO: 78234 - DNA, 120 bp, Homo sapiens
  misc_feature: 573 for SV(C|O) and mtDNA
tgacttctagcaagcctcgctaacctcgccttaccccccactattaacctactgggagaactctctgtgctagtaaccacgttctcctgatcaaatatcactctcctacttacaggactc

SEQ ID NO: 78235 - DNA, 120 bp, Homo sapiens
  misc_feature: 573 for SV(C|O) and mtDNA
tctcttccttctctccttaatgacattaacactattctcaccagacctcctaggcgacccagacaattataccctagccaaccccttaaacacccctccccacatcaagcccgaatgata

SEQ ID NO: 78236 - DNA, 120 bp, Homo sapiens
  misc_feature: 573 for SV(C|O) and mtDNA
tctcctactcctgctcgcatctgctatagtggaggccggagcaggaacaggttgaacagtctaccctcccttagcagggaactactcccaccctggagcctccgtagacctaaccatctt

SEQ ID NO: 78237 - DNA, 120 bp, Homo sapiens
  misc_feature: 573 for SV(C|O) and mtDNA
tcgtcctagaattaattcccctaaaaatctttgaaatagggcccgtatttaccctatagcaccccctctaccccctctagagcccactgtaaagctaacttagcattaaccttttaagtt

SEQ ID NO: 78238 - DNA, 120 bp, Homo sapiens
  misc_feature: 573 for SV(C|O) and mtDNA
tcctcttcaacaatatactctccggacaatgaaccataaccaatactaccaatcaatactcatcattaataatcataatggctatagcaataaaactaggaatagccccctttcacttct

SEQ ID NO: 78239 - DNA, 120 bp, Homo sapiens
  misc_feature: 573 for SV(C|O) and mtDNA
gtctgatccgtcctaatcacagcagtcctacttctcctatctctcccagtcctagctgctggcatcactatactactaacagaccgcaacctcaacaccaccttcttcgaccccgccgga

SEQ ID NO: 78240 - DNA, 120 bp, Homo sapiens
  misc_feature: 573 for SV(C|O) and mtDNA
tcagggatgggttcgattctcatagtcctagaaataagggggtttaagctcctattatttactctatcaaagtaactcttttatcagacatatttcttaggtttgagggggaatgctgga

SEQ ID NO: 78241 - DNA, 120 bp, Homo sapiens; identical to SEQ ID NO: 62325
  misc_feature: 573 for SV(C|O) and mtDNA

SEQ ID NO: 78242 - DNA, 120 bp, Homo sapiens
  misc_feature: 573 for SV(C|O) and mtDNA
taagggagggatcgttgacctcgtctgttatgtaaaggatgcgcagggatgggagggcgatgaggactaggatgatggcgggcaggatagttcagacggtttctatttcctgagcgtctg

SEQ ID NO: 78243 - DNA, 120 bp, Homo sapiens; identical to SEQ ID NO: 62982
  misc_feature: 573 for SV(C|O) and mtDNA

SEQ ID NO: 78244 - DNA, 120 bp, Homo sapiens
  misc_feature: 573 for SV(C|O) and mtDNA
ggcattatcctcctgcttgcaactatagcaacagccttcataggctatgtcctcccgtgaggccaaatatcattctgaggggccacagtaattacaaacttactatccgccatcccatac

SEQ ID NO: 78245 - DNA, 120 bp, Homo sapiens
  misc_feature: 573 for SV(C|O) and mtDNA
cacacctcatatcctccctactatgcctagaaggaataatactatcactgttcattatagctactctcataaccctcaacacccactccctcttagccaatattgtgcctattgccatac

SEQ ID NO: 78246 - DNA, 120 bp, Homo sapiens; identical to SEQ ID NO: 62660
  misc_feature: 573 for SV(C|O) and mtDNA

SEQ ID NO: 78247 - DNA, 120 bp, Homo sapiens
  misc_feature: 573 for SV(C|O) and mtDNA
ctcttcgtctgatccgtcctaatcacagcagtcctacttctcctatctctcccagtcctagctgctggcatcactatactactaacagaccgcaacctcaacaccaccttcttcgacccc

SEQ ID NO: 78248 - DNA, 120 bp, Homo sapiens; identical to SEQ ID NO: 58149
  misc_feature: 573 for SV(C|O) and mtDNA

SEQ ID NO: 78249 - DNA, 120 bp, Homo sapiens
  misc_feature: 573 for SV(C|O) and mtDNA
ggcacccaaatctgcttccccatgaaagaacagagaatagtttaaattagaatcttagctttgggtgctaatggtggagttaaagactttttctctgatttgtccttggaaaaaggtttt

SEQ ID NO: 78250 - DNA, 120 bp, Homo sapiens
  misc_feature: 573 for SV(C|O) and mtDNA
ggattatgatgcgactgtgagtgcgttcgtagtttgagtttgctaggcagaatagtaatgaggatgtaagtccgtgggcgattatgagaatgactgcgccggtgaagcttcagggggttt

SEQ ID NO: 78251 - DNA, 120 bp, Homo sapiens
  misc_feature: 573 for SV(C|O) and mtDNA
gactagaaaagctattacctaaaacaatttcacagcaccaaatctccacctccatcatcacctcaacccaaaaaggcataattaaactttacttcctctctttcttcttcccactcatcc

SEQ ID NO: 78252 - DNA, 120 bp, Homo sapiens
  misc_feature: 573 for SV(C|O) and mtDNA
gcaggttttggctcgtaagaaggcctagataggggattgtgcggtgtgtgatggtagggtagaatccgagtatgttggagaaataaaatgtgcatagtggggattttattttaagtttgt

SEQ ID NO: 78253 - DNA, 120 bp, Homo sapiens; identical to SEQ ID NO: 62696
  misc_feature: 573 for SV(C|O) and mtDNA

SEQ ID NO: 78254 - DNA, 120 bp, Homo sapiens; identical to SEQ ID NO: 59440
  misc_feature: 573 for SV(C|O) and mtDNA

SEQ ID NO: 78255 - DNA, 120 bp, Homo sapiens
  misc_feature: 573 for SV(C|O) and mtDNA
ctgggtcccagaggttacccaaggcacccctctgacatccggcctgcttcttctcacatgacaaaaactagcccccatctcaatcatataccaaatctctccctcactaaacgtaagcct

SEQ ID NO: 78256 - DNA, 120 bp, Homo sapiens
  misc_feature: 573 for SV(C|O) and mtDNA
atgatcacgccctcataatcattttccttatctgcttcctagtcctgtatgcccttttcctaacactcacaacaaaactaactaatactaacatctcagacgctcaggaaatagaaaccg

SEQ ID NO: 78257 - DNA, 120 bp, Homo sapiens
  misc_feature: 573 for SV(C|O) and mtDNA
cgatgtctagtgatgagtttgctaatacaatgccagtcaggccgcctacggtgaaaagaaagatgaatcctagggctcagagcactgcagcagatcatttcatattgcttccgtggagtg

SEQ ID NO: 78258 - DNA, 120 bp, Homo sapiens
  misc_feature: 573 for SV(C|O) and mtDNA
ccactcaagcactatagttgtagcaggaatcttcttactcatccgcttccaccccctagcagaaaatagcccactaatccaaactctaacactatgcttaggcgctatcaccactctgtt

SEQ ID NO: 78259 - DNA, 120 bp, Homo sapiens; identical to SEQ ID NO: 61726
  misc_feature: 573 for SV(C|O) and mtDNA

SEQ ID NO: 78260 - DNA, 120 bp, Homo sapiens
  misc_feature: 573 for SV(C|O) and mtDNA
atgaagtgaaaggtaaagaatcgtgtgagggtgggactgtctactgagtagcctcctcagattcattgaactaggtctgtcccaatgtatgggatggcggatagtaagtttgtaattact

SEQ ID NO: 78261 - DNA, 120 bp, Homo sapiens
  misc_feature: 573 for SV(C|O) and mtDNA
atacggtagtatttagttggggcatttcactgtaaagaggtgttggttctcttaatctttaacttaaaaggttaatgctaagttagctttacagtgggctctagagggggtagagggggt

SEQ ID NO: 78262 - DNA, 120 bp, Homo sapiens
  misc_feature: 573 for SV(C|O) and mtDNA
aggattatgatgcgactgtgagtgcgttcgtagtttgagtttgctaggcagaatagtaatgaggatgtaagtccgtgggcgattatgagaatgactgcgccggtgaagcttcagggggtt

SEQ ID NO: 78263 - DNA, 120 bp, Homo sapiens
  misc_feature: 572 for SV(C|O) and mtDNA
acctgcgactccttgacgttgacaatcgagtagtactcccgattgaagcccccattcgtataataattacatcacaagacgtcttgcactcatgagctgtccccacattaggcttaaaaa

SEQ ID NO: 78264 - DNA, 120 bp, Homo sapiens
  misc_feature: 572 for SV(C|O) and mtDNA
ttgggcaaaaagccggttagcgggggcaggcctcctagggagaggagggtggatggaattaagggtgttagtcatgttagcttgtttcaggtgcgagatagtagtagggtcgtggtgctg

SEQ ID NO: 78265 - DNA, 120 bp, Homo sapiens
  misc_feature: 572 for SV(C|O) and mtDNA
agcccactaatccaaactctaacactatgcttaggcgctatcaccactctgttcgcagcagtctgcgcccttacacaaaatgacatcaaaaaaatcgtagccttctccacttcaagtcaa

SEQ ID NO: 78266 - DNA, 120 bp, Homo sapiens
  misc_feature: 572 for SV(C|O) and mtDNA
ttcgtctgatccgtcctaatcacagcagtcctacttctcctatctctcccagtcctagctgctggcatcactatactactaacagaccgcaacctcaacaccaccttcttcgaccccgcc

SEQ ID NO: 78267 - DNA, 120 bp, Homo sapiens
  misc_feature: 572 for SV(C|O) and mtDNA
ttcacttctgggtcccagaggttacccaaggcacccctctgacatccggcctgcttcttctcacatgacaaaaactagcccccatctcaatcatataccaaatctctccctcactaaacg

SEQ ID NO: 78268 - DNA, 120 bp, Homo sapiens
  misc_feature: 572 for SV(C|O) and mtDNA
cttggtctaggcacatgaatattgttgtggggaagagactgataataaaggtggatgcgacaatggattttacataatgggggtatgagttttttttgttagggttaacgagggtggtaa

SEQ ID NO: 78269 - DNA, 120 bp, Homo sapiens
  misc_feature: 572 for SV(C|O) and mtDNA
gaagtcatcaaaaagctattagtgggagtagagtttgaagtccttgagagaggattatgatgcgactgtgagtgcgttcgtagtttgagtttgctaggcagaatagtaatgaggatgtaa

SEQ ID NO: 78270 - DNA, 120 bp, Homo sapiens; identical to SEQ ID NO: 62050
  misc_feature: 572 for SV(C|O) and mtDNA

SEQ ID NO: 78271 - DNA, 120 bp, Homo sapiens
  misc_feature: 572 for SV(C|O) and mtDNA
tggtctaggcacatgaatattgttgtggggaagagactgataataaaggtggatgcgacaatggattttacataatgggggtatgagttttttttgttagggttaacgagggtggtaagg

SEQ ID NO: 78272 - DNA, 120 bp, Homo sapiens; identical to SEQ ID NO: 62699
  misc_feature: 572 for SV(C|O) and mtDNA

SEQ ID NO: 78273 - DNA, 120 bp, Homo sapiens; identical to SEQ ID NO: 58014
  misc_feature: 572 for SV(C|O) and mtDNA

SEQ ID NO: 78274 - DNA, 120 bp, Homo sapiens; identical to SEQ ID NO: 58552
  misc_feature: 572 for SV(C|O) and mtDNA

SEQ ID NO: 78275 - DNA, 120 bp, Homo sapiens
  misc_feature: 572 for SV(C|O) and mtDNA
tgactagaaaagctattacctaaaacaatttcacagcaccaaatctccacctccatcatcacctcaacccaaaaaggcataattaaactttacttcctctctttcttcttcccactcatc

SEQ ID NO: 78276 - DNA, 120 bp, Homo sapiens
  misc_feature: 572 for SV(C|O) and mtDNA
cagcttaaaactcaaaggacctggcggtgcttcatatccctctagaggagcctgttctgtaatcgataaaccccgatcaacctcaccacctcttgctcagcctatataccgccatcttca

SEQ ID NO: 78277 - DNA, 120 bp, Homo sapiens
  misc_feature: 572 for SV(C|O) and mtDNA
tcttcgtctgatccgtcctaatcacagcagtcctacttctcctatctctcccagtcctagctgctggcatcactatactactaacagaccgcaacctcaacaccaccttcttcgaccccg

SEQ ID NO: 78278 - DNA, 120 bp, Homo sapiens
  misc_feature: 572 for SV(C|O) and mtDNA
tcgtctgatccgtcctaatcacagcagtcctacttctcctatctctcccagtcctagctgctggcatcactatactactaacagaccgcaacctcaacaccaccttcttcgaccccgccg

SEQ ID NO: 78279 - DNA, 120 bp, Homo sapiens; identical to SEQ ID NO: 62579
  misc_feature: 572 for SV(C|O) and mtDNA

SEQ ID NO: 78280 - DNA, 120 bp, Homo sapiens; identical to SEQ ID NO: 57665
  misc_feature: 572 for SV(C|O) and mtDNA

SEQ ID NO: 78281 - DNA, 120 bp, Homo sapiens
  misc_feature: 572 for SV(C|O) and mtDNA
gcctaccccttccttgtactatccctatgaggcataattataacaagctccatctgcctacgacaaacagacctaaaatcgctcattgcatactcttcaatcagccacatagccctcgta

SEQ ID NO: 78282 - DNA, 120 bp, Homo sapiens
  misc_feature: 572 for SV(C|O) and mtDNA
taacctccctgttcttatgaattcgaacagcatacccccgattccgctacgaccaactcatacacctcctatgaaaaaacttcctaccactcaccctagcattacttatatgatatgtct

SEQ ID NO: 78283 - DNA, 120 bp, Homo sapiens
  misc_feature: 572 for SV(C|O) and mtDNA
catcctagtcctcatcgccctcccatccctgcgcatcctttacataacagacgaggtcaacgatccctcccttaccatcaaatcaattggccaccaatggtactgaacctacgagtacac

SEQ ID NO: 78284 - DNA, 120 bp, Homo sapiens
  misc_feature: 572 for SV(C|O) and mtDNA
caactaggactcataatagttacaatcggcatcaaccaaccacacctagcattcctgcacatctgtacccacgccttcttcaaagccatactatttatgtgctccgggtccatcatccac

SEQ ID NO: 78285 - DNA, 120 bp, Homo sapiens
  misc_feature: 572 for SV(C|O) and mtDNA
gtgcactttccagtacacttaccatgttacgacttgtctcctctatataaatgcgtaggggttttagttaaatgtcctttgaagtatacttgaggagggtgacgggcggtgtgtacgcgc

SEQ ID NO: 78286 - DNA, 120 bp, Homo sapiens; identical to SEQ ID NO: 60296
  misc_feature: 572 for SV(C|O) and mtDNA

SEQ ID NO: 78287 - DNA, 120 bp, Homo sapiens
  misc_feature: 572 for SV(C|O) and mtDNA
gggttgttagggggtcggaggaaaaggttggggaacagctaaataggttgttgttgatttggttaaaaaatagtagagggatgatgctaataattaggctgtgggtggttgtgttgattc

SEQ ID NO: 78288 - DNA, 120 bp, Homo sapiens
  misc_feature: 572 for SV(C|O) and mtDNA
gggggttgttagggggtcggaggaaaaggttggggaacagctaaataggttgttgttgatttggttaaaaaatagtagagggatgatgctaataattaggctgtgggtggttgtgttgat

SEQ ID NO: 78289 - DNA, 120 bp, Homo sapiens
  misc_feature: 572 for SV(C|O) and mtDNA
cagtgcgagcttagcgctgtgatgagtgtgcctgcaaagatggtagagtagatgacgggttgggccaggggattaattagtacgggaagggtataaccaacattttcggggtatgggccc

SEQ ID NO: 78290 - DNA, 120 bp, Homo sapiens
  misc_feature: 572 for SV(C|O) and mtDNA
ggagtgtggcgagtcagctaaatactttgacgccggtggggatagcgatgattatggtagcggaggtgaaatatgctcgtgtgtctacgtctattcctactgtaaatatatggtgtgctc

SEQ ID NO: 78291 - DNA, 120 bp, Homo sapiens; identical to SEQ ID NO: 63037
  misc_feature: 572 for SV(C|O) and mtDNA

SEQ ID NO: 78292 - DNA, 120 bp, Homo sapiens
  misc_feature: 572 for SV(C|O) and mtDNA
gcagcagcaggcaaatcagcccaattaggtctccacccctgactcccctcagccatagaaggccccaccccagtctcagccctactccactcaagcactatagttgtagcaggaatcttc

SEQ ID NO: 78293 - DNA, 120 bp, Homo sapiens
  misc_feature: 572 for SV(C|O) and mtDNA
ctattcttgcacgaaacgggatcaaacaaccccctaggaatcacctcccattccgataaaatcaccttccacccttactacacaatcaaagacgccctcggcttacttctcttccttctc

SEQ ID NO: 78294 - DNA, 120 bp, Homo sapiens
  misc_feature: 572 for SV(C|O) and mtDNA
gactccttgacgttgacaatcgagtagtactcccgattgaagcccccattcgtataataattacatcacaagacgtcttgcactcatgagctgtccccacattaggcttaaaaacagatg

SEQ ID NO: 78295 - DNA, 120 bp, Homo sapiens
  misc_feature: 572 for SV(C|O) and mtDNA
ctgttacagaaattaagtattgcaacttactgagggctttgaaggctcttggtctgtatttaacctaaatttctataagattattagtataaaaggggagataggtaggagtagcgtggt

SEQ ID NO: 78296 - DNA, 120 bp, Homo sapiens
  misc_feature: 572 for SV(C|O) and mtDNA
agcttaaaactcaaaggacctggcggtgcttcatatccctctagaggagcctgttctgtaatcgataaaccccgatcaacctcaccacctcttgctcagcctatataccgccatcttcag

SEQ ID NO: 78297 - DNA, 120 bp, Homo sapiens
  misc_feature: 572 for SV(C|O) and mtDNA
ctaggtgtggttggttgatgccgattgtaactattatgagtcctagttgacttgaagtggagaaggctacgatttttttgatgtcattttgtgtaagggcgcagactgctgcgaacagag

SEQ ID NO: 78298 - DNA, 120 bp, Homo sapiens; identical to SEQ ID NO: 59670
  misc_feature: 572 for SV(C|O) and mtDNA

SEQ ID NO: 78299 - DNA, 120 bp, Homo sapiens; identical to SEQ ID NO: 60990
  misc_feature: 572 for SV(C|O) and mtDNA

SEQ ID NO: 78300 - DNA, 120 bp, Homo sapiens
  misc_feature: 572 for SV(C|O) and mtDNA
ctaccccttccttgtactatccctatgaggcataattataacaagctccatctgcctacgacaaacagacctaaaatcgctcattgcatactcttcaatcagccacatagccctcgtagt

SEQ ID NO: 78301 - DNA, 120 bp, Homo sapiens; identical to SEQ ID NO: 59443
  misc_feature: 572 for SV(C|O) and mtDNA

SEQ ID NO: 78302 - DNA, 120 bp, Homo sapiens
  misc_feature: 572 for SV(C|O) and mtDNA
actagtatggcaataggcacaatattggctaagagggagtgggtgttgagggttatgagagtagctataatgaacagtgatagtattattccttctaggcatagtagggaggatatgagg

SEQ ID NO: 78303 - DNA, 120 bp, Homo sapiens; identical to SEQ ID NO: 62628
  misc_feature: 572 for SV(C|O) and mtDNA

SEQ ID NO: 78304 - DNA, 120 bp, Homo sapiens
  misc_feature: 572 for SV(C|O) and mtDNA
ataggaggtggagtgctgctagggctgcaataatgaagggcaagatgaagtgaaaggtaaagaatcgtgtgagggtgggactgtctactgagtagcctcctcagattcattgaactaggt

SEQ ID NO: 78305 - DNA, 120 bp, Homo sapiens; identical to SEQ ID NO: 62678
  misc_feature: 572 for SV(C|O) and mtDNA

SEQ ID NO: 78306 - DNA, 120 bp, Homo sapiens; identical to SEQ ID NO: 55854
  misc_feature: 571 for SV(C|O) and mtDNA

SEQ ID NO: 78307 - DNA, 120 bp, Homo sapiens; identical to SEQ ID NO: 59393
  misc_feature: 571 for SV(C|O) and mtDNA

SEQ ID NO: 78308 - DNA, 120 bp, Homo sapiens
  misc_feature: 571 for SV(C|O) and mtDNA
tcataatagttacaatcggcatcaaccaaccacacctagcattcctgcacatctgtacccacgccttcttcaaagccatactatttatgtgctccgggtccatcatccacaaccttaaca

SEQ ID NO: 78309 - DNA, 120 bp, Homo sapiens
  misc_feature: 571 for SV(C|O) and mtDNA
gcattatcctcctgcttgcaactatagcaacagccttcataggctatgtcctcccgtgaggccaaatatcattctgaggggccacagtaattacaaacttactatccgccatcccataca

SEQ ID NO: 78310 - DNA, 120 bp, Homo sapiens
  misc_feature: 571 for SV(C|O) and mtDNA
tgacccccctcagataggggtcccttgaccaccatcctccgtgaaatcaatatcccgcacaagagtgctactctcctcgctccgggcccataacacttgggggtagctaaagtgaactgt

SEQ ID NO: 78311 - DNA, 120 bp, Homo sapiens; identical to SEQ ID NO: 62836
  misc_feature: 571 for SV(C|O) and mtDNA

SEQ ID NO: 78312 - DNA, 120 bp, Homo sapiens
  misc_feature: 571 for SV(C|O) and mtDNA
tcttccttctctccttaatgacattaacactattctcaccagacctcctaggcgacccagacaattataccctagccaaccccttaaacacccctccccacatcaagcccgaatgatatt

SEQ ID NO: 78313 - DNA, 120 bp, Homo sapiens
  misc_feature: 571 for SV(C|O) and mtDNA
tctcagacgctcaggaaatagaaaccgtctgaactatcctgcccgccatcatcctagtcctcatcgccctcccatccctgcgcatcctttacataacagacgaggtcaacgatccctccc

SEQ ID NO: 78314 - DNA, 120 bp, Homo sapiens
  misc_feature: 571 for SV(C|O) and mtDNA
tcctgcttgcaactatagcaacagccttcataggctatgtcctcccgtgaggccaaatatcattctgaggggccacagtaattacaaacttactatccgccatcccatacattgggacag

SEQ ID NO: 78315 - DNA, 120 bp, Homo sapiens; identical to SEQ ID NO: 62685
  misc_feature: 571 for SV(C|O) and mtDNA

SEQ ID NO: 78316 - DNA, 120 bp, Homo sapiens
  misc_feature: 571 for SV(C|O) and mtDNA
taatagttacaatcggcatcaaccaaccacacctagcattcctgcacatctgtacccacgccttcttcaaagccatactatttatgtgctccgggtccatcatccacaaccttaacaatg

SEQ ID NO: 78317 - DNA, 120 bp, Homo sapiens; identical to SEQ ID NO: 57140
  misc_feature: 571 for SV(C|O) and mtDNA

SEQ ID NO: 78318 - DNA, 120 bp, Homo sapiens
  misc_feature: 571 for SV(C|O) and mtDNA
gcccactaatccaaactctaacactatgcttaggcgctatcaccactctgttcgcagcagtctgcgcccttacacaaaatgacatcaaaaaaatcgtagccttctccacttcaagtcaac

SEQ ID NO: 78319 - DNA, 120 bp, Homo sapiens; identical to SEQ ID NO: 58562
  misc_feature: 571 for SV(C|O) and mtDNA

SEQ ID NO: 78320 - DNA, 120 bp, Homo sapiens; identical to SEQ ID NO: 61656
  misc_feature: 571 for SV(C|O) and mtDNA

SEQ ID NO: 78321 - DNA, 120 bp, Homo sapiens
  misc_feature: 571 for SV(C|O) and mtDNA
gtccaaaaaggccttcgatacgggataatcctatttattacctcagaagtttttttcttcgcaggatttttctgagccttttaccactccagcctagcccctaccccccaattaggaggg

SEQ ID NO: 78322 - DNA, 120 bp, Homo sapiens; identical to SEQ ID NO: 61119
  misc_feature: 571 for SV(C|O) and mtDNA

SEQ ID NO: 78323 - DNA, 120 bp, Homo sapiens
  misc_feature: 571 for SV(C|O) and mtDNA
ggtgtgttattattctgaattttgggggaggttatatgggtttaatagtttttttaatttatttagggggaatgatggttgtctttggatatactacagcgatggctattgaggagtatc

SEQ ID NO: 78324 - DNA, 120 bp, Homo sapiens; identical to SEQ ID NO: 59288
  misc_feature: 571 for SV(C|O) and mtDNA

SEQ ID NO: 78325 - DNA, 120 bp, Homo sapiens; identical to SEQ ID NO: 62185
  misc_feature: 571 for SV(C|O) and mtDNA

SEQ ID NO: 78326 - DNA, 120 bp, Homo sapiens
  misc_feature: 571 for SV(C|O) and mtDNA
gcttctgactcttacctccctctctcctactcctgctcgcatctgctatagtggaggccggagcaggaacaggttgaacagtctaccctcccttagcagggaactactcccaccctggag

SEQ ID NO: 78327 - DNA, 120 bp, Homo sapiens; identical to SEQ ID NO: 62682
  misc_feature: 571 for SV(C|O) and mtDNA

SEQ ID NO: 78328 - DNA, 120 bp, Homo sapiens
  misc_feature: 571 for SV(C|O) and mtDNA
gcaggcgccaaggagtgagccgaagtttcatcatgcggagatgttggatggggtggggaggtcgatgaatgagtggttaattaattttattagggggttaattttgcgtattggggtcat

SEQ ID NO: 78329 - DNA, 120 bp, Homo sapiens
  misc_feature: 571 for SV(C|O) and mtDNA
gcagaaaatagcccactaatccaaactctaacactatgcttaggcgctatcaccactctgttcgcagcagtctgcgcccttacacaaaatgacatcaaaaaaatcgtagccttctccact

SEQ ID NO: 78330 - DNA, 120 bp, Homo sapiens
  misc_feature: 571 for SV(C|O) and mtDNA
atccgccatcccatacattgggacagacctagttcaatgaatctgaggaggctactcagtagacagtcccaccctcacacgattctttacctttcacttcatcttgcccttcattattgc

SEQ ID NO: 78331 - DNA, 120 bp, Homo sapiens
  misc_feature: 571 for SV(C|O) and mtDNA
gattatgatgcgactgtgagtgcgttcgtagtttgagtttgctaggcagaatagtaatgaggatgtaagtccgtgggcgattatgagaatgactgcgccggtgaagcttcagggggtttg

SEQ ID NO: 78332 - DNA, 120 bp, Homo sapiens
  misc_feature: 571 for SV(C|O) and mtDNA
aacatactagtcacagccctatactccctctacatatttaccacaacacaatggggctcactcacccaccacattaacaacataaaaccctcattcacacgagaaaacaccctcatgttc

SEQ ID NO: 78333 - DNA, 120 bp, Homo sapiens
  misc_feature: 571 for SV(C|O) and mtDNA
cttctaacctccctgttcttatgaattcgaacagcatacccccgattccgctacgaccaactcatacacctcctatgaaaaaacttcctaccactcaccctagcattacttatatgatat

SEQ ID NO: 78334 - DNA, 120 bp, Homo sapiens
  misc_feature: 571 for SV(C|O) and mtDNA
cgccgaccgttgactattctctacaaaccacaaagacattggaacactatacctattattcggcgcatgagctggagtcctaggcacagctctaagcctccttattcgagccgagctggg

SEQ ID NO: 78335 - DNA, 120 bp, Homo sapiens
  misc_feature: 571 for SV(C|O) and mtDNA
ccttgagagaggattatgatgcgactgtgagtgcgttcgtagtttgagtttgctaggcagaatagtaatgaggatgtaagtccgtgggcgattatgagaatgactgcgccggtgaagctt

SEQ ID NO: 78336 - DNA, 120 bp, Homo sapiens
  misc_feature: 571 for SV(C|O) and mtDNA
cctcttcaacaatatactctccggacaatgaaccataaccaatactaccaatcaatactcatcattaataatcataatggctatagcaataaaactaggaatagccccctttcacttctg

SEQ ID NO: 78337 - DNA, 120 bp, Homo sapiens
  misc_feature: 571 for SV(C|O) and mtDNA
actaatccaaactctaacactatgcttaggcgctatcaccactctgttcgcagcagtctgcgcccttacacaaaatgacatcaaaaaaatcgtagccttctccacttcaagtcaactagg

SEQ ID NO: 78338 - DNA, 120 bp, Homo sapiens; identical to SEQ ID NO: 59993
  misc_feature: 571 for SV(C|O) and mtDNA

SEQ ID NO: 78339 - DNA, 120 bp, Homo sapiens
  misc_feature: 571 for SV(C|O) and mtDNA
attactatccatcctcatcctagcaataatccccatcctccatatatccaaacaacaaagcataatatttcgcccactaagccaatcactttattgactcctagccgcagacctcctcat

SEQ ID NO: 78340 - DNA, 120 bp, Homo sapiens
  misc_feature: 571 for SV(C|O) and mtDNA
atgacttctagcaagcctcgctaacctcgccttaccccccactattaacctactgggagaactctctgtgctagtaaccacgttctcctgatcaaatatcactctcctacttacaggact

SEQ ID NO: 78341 - DNA, 120 bp, Homo sapiens; identical to SEQ ID NO: 57395
  misc_feature: 570 for SV(C|O) and mtDNA

SEQ ID NO: 78342 - DNA, 120 bp, Homo sapiens
  misc_feature: 570 for SV(C|O) and mtDNA
acaacatatgacgcactctcccctgaactctacacaacatattttgtcaccaagaccctacttctaacctccctgttcttatgaattcgaacagcatacccccgattccgctacgaccaa

SEQ ID NO: 78343 - DNA, 120 bp, Homo sapiens
  misc_feature: 570 for SV(C|O) and mtDNA
ttgccctattactatccatcctcatcctagcaataatccccatcctccatatatccaaacaacaaagcataatatttcgcccactaagccaatcactttattgactcctagccgcagacc

SEQ ID NO: 78344 - DNA, 120 bp, Homo sapiens
  misc_feature: 570 for SV(C|O) and mtDNA
ttgcaactatagcaacagccttcataggctatgtcctcccgtgaggccaaatatcattctgaggggccacagtaattacaaacttactatccgccatcccatacattgggacagacctag

SEQ ID NO: 78345 - DNA, 120 bp, Homo sapiens
  misc_feature: 570 for SV(C|O) and mtDNA
aaaataggaggactactcaaaaccatacctctcacttcaacctccctcaccattggcagcctagcattagcaggaatacctttcctcacaggtttctactccaaagaccacatcatcgaa

SEQ ID NO: 78346 - DNA, 120 bp, Homo sapiens
  misc_feature: 570 for SV(C|O) and mtDNA
ttaattatgcctttttgggttgaggtgatgatggaggtggagatttggtgctgtgaaattgttttaggtaatagcttttctagtcaggttaggtctaggaggagtaggggcaggttttgg

SEQ ID NO: 78347 - DNA, 120 bp, Homo sapiens; identical to SEQ ID NO: 63011
  misc_feature: 570 for SV(C|O) and mtDNA

SEQ ID NO: 78348 - DNA, 120 bp, Homo sapiens
  misc_feature: 570 for SV(C|O) and mtDNA
tgtggtctttggagtagaaacctgtgaggaaaggtattcctgctaatgctaggctgccaatggtgagggaggttgaagtgagaggtatggttttgagtagtcctcctatttttcggatat

SEQ ID NO: 78349 - DNA, 120 bp, Homo sapiens
  misc_feature: 570 for SV(C|O) and mtDNA
tggtaggaagttttttcataggaggtgtatgagttggtcgtagcggaatcgggggtatgctgttcgaattcataagaacagggaggttagaagtagggtcttggtgacaaaatatgttgt

SEQ ID NO: 78350 - DNA, 120 bp, Homo sapiens
  misc_feature: 570 for SV(C|O) and mtDNA
tgcgactccttgacgttgacaatcgagtagtactcccgattgaagcccccattcgtataataattacatcacaagacgtcttgcactcatgagctgtccccacattaggcttaaaaacag

SEQ ID NO: 78351 - DNA, 120 bp, Homo sapiens
  misc_feature: 570 for SV(C|O) and mtDNA
tagcccactaatccaaactctaacactatgcttaggcgctatcaccactctgttcgcagcagtctgcgcccttacacaaaatgacatcaaaaaaatcgtagccttctccacttcaagtca

SEQ ID NO: 78352 - DNA, 120 bp, Homo sapiens; identical to SEQ ID NO: 54361
  misc_feature: 570 for SV(C|O) and mtDNA

SEQ ID NO: 78353 - DNA, 120 bp, Homo sapiens
  misc_feature: 570 for SV(C|O) and mtDNA
gctaggtgtggttggttgatgccgattgtaactattatgagtcctagttgacttgaagtggagaaggctacgatttttttgatgtcattttgtgtaagggcgcagactgctgcgaacaga

SEQ ID NO: 78354 - DNA, 120 bp, Homo sapiens; identical to SEQ ID NO: 58376
  misc_feature: 570 for SV(C|O) and mtDNA

SEQ ID NO: 78355 - DNA, 120 bp, Homo sapiens; identical to SEQ ID NO: 62627
  misc_feature: 570 for SV(C|O) and mtDNA

SEQ ID NO: 78356 - DNA, 120 bp, Homo sapiens; identical to SEQ ID NO: 59138
  misc_feature: 570 for SV(C|O) and mtDNA

SEQ ID NO: 78357 - DNA, 120 bp, Homo sapiens
  misc_feature: 570 for SV(C|O) and mtDNA
tcatacacaaacgcctgagccctatctattactctcatcgctacctccctgacaagcgcctatagcactcgaataattcttctcaccctaacaggtcaacctcgcttccccacccttact

SEQ ID NO: 78358 - DNA, 120 bp, Homo sapiens
  misc_feature: 570 for SV(C|O) and mtDNA
gaagtccttgagagaggattatgatgcgactgtgagtgcgttcgtagtttgagtttgctaggcagaatagtaatgaggatgtaagtccgtgggcgattatgagaatgactgcgccggtga

SEQ ID NO: 78359 - DNA, 120 bp, Homo sapiens; identical to SEQ ID NO: 62052
  misc_feature: 570 for SV(C|O) and mtDNA

SEQ ID NO: 78360 - DNA, 120 bp, Homo sapiens
  misc_feature: 570 for SV(C|O) and mtDNA
caaaaccatacctctcacttcaacctccctcaccattggcagcctagcattagcaggaatacctttcctcacaggtttctactccaaagaccacatcatcgaaaccgcaaacatatcata

SEQ ID NO: 78361 - DNA, 120 bp, Homo sapiens; identical to SEQ ID NO: 62586
  misc_feature: 570 for SV(C|O) and mtDNA

SEQ ID NO: 78362 - DNA, 120 bp, Homo sapiens
  misc_feature: 570 for SV(C|O) and mtDNA
taagggtggaaggtgattttatcggaatgggaggtgattcctagggggttgtttgatcccgtttcgtgcaagaataggaggtggagtgctgctagggctgcaataatgaagggcaagatg

SEQ ID NO: 78363 - DNA, 120 bp, Homo sapiens
  misc_feature: 570 for SV(C|O) and mtDNA
gtctaggcacatgaatattgttgtggggaagagactgataataaaggtggatgcgacaatggattttacataatgggggtatgagttttttttgttagggttaacgagggtggtaaggat

SEQ ID NO: 78364 - DNA, 120 bp, Homo sapiens
  misc_feature: 570 for SV(C|O) and mtDNA
aactcaaactacgaacgcactcacagtcgcatcataatcctctctcaaggacttcaaactctactcccactaatagctttttgatgacttctagcaagcctcgctaacctcgccttaccc

SEQ ID NO: 78365 - DNA, 120 bp, Homo sapiens
  misc_feature: 570 for SV(C|O) and mtDNA
ctcaaactacgaacgcactcacagtcgcatcataatcctctctcaaggacttcaaactctactcccactaatagctttttgatgacttctagcaagcctcgctaacctcgccttaccccc

SEQ ID NO: 78366 - DNA, 120 bp, Homo sapiens
  misc_feature: 570 for SV(C|O) and mtDNA
ggaggggggttgttagggggtcggaggaaaaggttggggaacagctaaataggttgttgttgatttggttaaaaaatagtagagggatgatgctaataattaggctgtgggtggttgtgt

SEQ ID NO: 78367 - DNA, 120 bp, Homo sapiens; identical to SEQ ID NO: 62564
  misc_feature: 570 for SV(C|O) and mtDNA

SEQ ID NO: 78368 - DNA, 120 bp, Homo sapiens; identical to SEQ ID NO: 59382
  misc_feature: 570 for SV(C|O) and mtDNA

SEQ ID NO: 78369 - DNA, 120 bp, Homo sapiens; identical to SEQ ID NO: 62204
  misc_feature: 570 for SV(C|O) and mtDNA

SEQ ID NO: 78370 - DNA, 120 bp, Homo sapiens
  misc_feature: 570 for SV(C|O) and mtDNA
actccttgacgttgacaatcgagtagtactcccgattgaagcccccattcgtataataattacatcacaagacgtcttgcactcatgagctgtccccacattaggcttaaaaacagatgc

SEQ ID NO: 78371 - DNA, 120 bp, Homo sapiens; identical to SEQ ID NO: 57180
  misc_feature: 570 for SV(C|O) and mtDNA

SEQ ID NO: 78372 - DNA, 120 bp, Homo sapiens
  misc_feature: 570 for SV(C|O) and mtDNA
cagtaagctacccttttaccatcattggacaagtagcatccgtactatacttcacaacaatcctaatcctaataccaactatctccctaattgaaaacaaaatactcaaatgggcctgtc

SEQ ID NO: 78373 - DNA, 120 bp, Homo sapiens
  misc_feature: 570 for SV(C|O) and mtDNA
ctgactagaaaagctattacctaaaacaatttcacagcaccaaatctccacctccatcatcacctcaacccaaaaaggcataattaaactttacttcctctctttcttcttcccactcat

SEQ ID NO: 78374 - DNA, 120 bp, Homo sapiens
  misc_feature: 570 for SV(C|O) and mtDNA
ctctcctactcctgctcgcatctgctatagtggaggccggagcaggaacaggttgaacagtctaccctcccttagcagggaactactcccaccctggagcctccgtagacctaaccatct

SEQ ID NO: 78375 - DNA, 120 bp, Homo sapiens
  misc_feature: 570 for SV(C|O) and mtDNA
ctagtatggcaataggcacaatattggctaagagggagtgggtgttgagggttatgagagtagctataatgaacagtgatagtattattccttctaggcatagtagggaggatatgaggt

SEQ ID NO: 78376 - DNA, 120 bp, Homo sapiens
  misc_feature: 570 for SV(C|O) and mtDNA
cgtagtaacagccattctcatccaaaccccctgaagcttcaccggcgcagtcattctcataatcgcccacggacttacatcctcattactattctgcctagcaaactcaaactacgaacg

SEQ ID NO: 78377 - DNA, 120 bp, Homo sapiens
  misc_feature: 570 for SV(C|O) and mtDNA
agtgcactttccagtacacttaccatgttacgacttgtctcctctatataaatgcgtaggggttttagttaaatgtcctttgaagtatacttgaggagggtgacgggcggtgtgtacgcg

SEQ ID NO: 78378 - DNA, 120 bp, Homo sapiens; identical to SEQ ID NO: 53346
  misc_feature: 570 for SV(C|O) and mtDNA

SEQ ID NO: 78379 - DNA, 120 bp, Homo sapiens
  misc_feature: 570 for SV(C|O) and mtDNA
ccctacttctaacctccctgttcttatgaattcgaacagcatacccccgattccgctacgaccaactcatacacctcctatgaaaaaacttcctaccactcaccctagcattacttatat

SEQ ID NO: 78380 - DNA, 120 bp, Homo sapiens
  misc_feature: 570 for SV(C|O) and mtDNA
agaggattatgatgcgactgtgagtgcgttcgtagtttgagtttgctaggcagaatagtaatgaggatgtaagtccgtgggcgattatgagaatgactgcgccggtgaagcttcaggggg

SEQ ID NO: 78381 - DNA, 120 bp, Homo sapiens
  misc_feature: 570 for SV(C|O) and mtDNA
caacatactagtcacagccctatactccctctacatatttaccacaacacaatggggctcactcacccaccacattaacaacataaaaccctcattcacacgagaaaacaccctcatgtt

SEQ ID NO: 78382 - DNA, 120 bp, Homo sapiens
  misc_feature: 570 for SV(C|O) and mtDNA
agggcaagatgaagtgaaaggtaaagaatcgtgtgagggtgggactgtctactgagtagcctcctcagattcattgaactaggtctgtcccaatgtatgggatggcggatagtaagtttg

SEQ ID NO: 78383 - DNA, 120 bp, Homo sapiens
  misc_feature: 570 for SV(C|O) and mtDNA
aactaatactaacatctcagacgctcaggaaatagaaaccgtctgaactatcctgcccgccatcatcctagtcctcatcgccctcccatccctgcgcatcctttacataacagacgaggt

SEQ ID NO: 78384 - DNA, 120 bp, Homo sapiens
  misc_feature: 570 for SV(C|O) and mtDNA
aagggcaagatgaagtgaaaggtaaagaatcgtgtgagggtgggactgtctactgagtagcctcctcagattcattgaactaggtctgtcccaatgtatgggatggcggatagtaagttt

SEQ ID NO: 78385 - DNA, 120 bp, Homo sapiens; identical to SEQ ID NO: 60979
  misc_feature: 569 for SV(C|O) and mtDNA

SEQ ID NO: 78386 - DNA, 120 bp, Homo sapiens; identical to SEQ ID NO: 59420
  misc_feature: 569 for SV(C|O) and mtDNA

SEQ ID NO: 78387 - DNA, 120 bp, Homo sapiens; identical to SEQ ID NO: 58312
  misc_feature: 569 for SV(C|O) and mtDNA

SEQ ID NO: 78388 - DNA, 120 bp, Homo sapiens
  misc_feature: 569 for SV(C|O) and mtDNA
tgttacatcgcgccatcattggtatatggttagtgtgttggttagtaggcctagtatgaggagcgttatggagtggaagtgaaatcacatggctaggccggaggtcattaggagggctga

SEQ ID NO: 78389 - DNA, 120 bp, Homo sapiens; identical to SEQ ID NO: 61057
  misc_feature: 569 for SV(C|O) and mtDNA

SEQ ID NO: 78390 - DNA, 120 bp, Homo sapiens
  misc_feature: 569 for SV(C|O) and mtDNA
ggcggtgcttcatatccctctagaggagcctgttctgtaatcgataaaccccgatcaacctcaccacctcttgctcagcctatataccgccatcttcagcaaaccctgatgaaggctaca

SEQ ID NO: 78391 - DNA, 120 bp, Homo sapiens
  misc_feature: 569 for SV(C|O) and mtDNA
tgaagtccttgagagaggattatgatgcgactgtgagtgcgttcgtagtttgagtttgctaggcagaatagtaatgaggatgtaagtccgtgggcgattatgagaatgactgcgccggtg

SEQ ID NO: 78392 - DNA, 120 bp, Homo sapiens; identical to SEQ ID NO: 61296
  misc_feature: 569 for SV(C|O) and mtDNA

SEQ ID NO: 78393 - DNA, 120 bp, Homo sapiens
  misc_feature: 569 for SV(C|O) and mtDNA
tccaaaaaggccttcgatacgggataatcctatttattacctcagaagtttttttcttcgcaggatttttctgagccttttaccactccagcctagcccctaccccccaattaggagggc

SEQ ID NO: 78394 - DNA, 120 bp, Homo sapiens
  misc_feature: 569 for SV(C|O) and mtDNA
ctacttctaacctccctgttcttatgaattcgaacagcatacccccgattccgctacgaccaactcatacacctcctatgaaaaaacttcctaccactcaccctagcattacttatatga

SEQ ID NO: 78395 - DNA, 120 bp, Homo sapiens; identical to SEQ ID NO: 55323
  misc_feature: 569 for SV(C|O) and mtDNA

SEQ ID NO: 78396 - DNA, 120 bp, Homo sapiens
  misc_feature: 569 for SV(C|O) and mtDNA
tagcagcagcaggcaaatcagcccaattaggtctccacccctgactcccctcagccatagaaggccccaccccagtctcagccctactccactcaagcactatagttgtagcaggaatct

SEQ ID NO: 78397 - DNA, 120 bp, Homo sapiens
  misc_feature: 569 for SV(C|O) and mtDNA
ggtttctatctacttcaaattcctccctgtacgaaaggacaagagaaataaggcctacttcacaaagcgccttcccccgtaaatgatatcatctcaacttagtattatacccacacccac

SEQ ID NO: 78398 - DNA, 120 bp, Homo sapiens
  misc_feature: 569 for SV(C|O) and mtDNA
agcagaaaatagcccactaatccaaactctaacactatgcttaggcgctatcaccactctgttcgcagcagtctgcgcccttacacaaaatgacatcaaaaaaatcgtagccttctccac

SEQ ID NO: 78399 - DNA, 120 bp, Homo sapiens
  misc_feature: 569 for SV(C|O) and mtDNA
gtcgtgtagtacgatgtctagtgatgagtttgctaatacaatgccagtcaggccgcctacggtgaaaagaaagatgaatcctagggctcagagcactgcagcagatcatttcatattgct

SEQ ID NO: 78400 - DNA, 120 bp, Homo sapiens
  misc_feature: 569 for SV(C|O) and mtDNA
gtcaactaggactcataatagttacaatcggcatcaaccaaccacacctagcattcctgcacatctgtacccacgccttcttcaaagccatactatttatgtgctccgggtccatcatcc

SEQ ID NO: 78401 - DNA, 120 bp, Homo sapiens; identical to SEQ ID NO: 62708
  misc_feature: 569 for SV(C|O) and mtDNA

SEQ ID NO: 78402 - DNA, 120 bp, Homo sapiens; identical to SEQ ID NO: 61330
  misc_feature: 569 for SV(C|O) and mtDNA

SEQ ID NO: 78403 - DNA, 120 bp, Homo sapiens; identical to SEQ ID NO: 62581
  misc_feature: 569 for SV(C|O) and mtDNA

SEQ ID NO: 78404 - DNA, 120 bp, Homo sapiens; identical to SEQ ID NO: 59721
  misc_feature: 569 for SV(C|O) and mtDNA

SEQ ID NO: 78405 - DNA, 120 bp, Homo sapiens
  misc_feature: 569 for SV(C|O) and mtDNA
gggcaagatgaagtgaaaggtaaagaatcgtgtgagggtgggactgtctactgagtagcctcctcagattcattgaactaggtctgtcccaatgtatgggatggcggatagtaagtttgt

SEQ ID NO: 78406 - DNA, 120 bp, Homo sapiens
  misc_feature: 569 for SV(C|O) and mtDNA
ggaaaaaaggcgggagaagccccggcaggtttgaagctgcttcttcgaatttgcaattcaatatgaaaatcacctcggagctggtaaaaagaggcctaacccctgtctttagatttacag

SEQ ID NO: 78407 - DNA, 120 bp, Homo sapiens
  misc_feature: 569 for SV(C|O) and mtDNA
cttcgtctgatccgtcctaatcacagcagtcctacttctcctatctctcccagtcctagctgctggcatcactatactactaacagaccgcaacctcaacaccaccttcttcgaccccgc

SEQ ID NO: 78408 - DNA, 120 bp, Homo sapiens
  misc_feature: 569 for SV(C|O) and mtDNA
gaagtttatattcttatcctaccaggcttcggaataatctcccatattgtaacttactactccggaaaaaaagaaccatttggatacataggtatggtctgagctatgatatcaattggc

SEQ ID NO: 78409 - DNA, 120 bp, Homo sapiens
  misc_feature: 569 for SV(C|O) and mtDNA
gaagggcaagatgaagtgaaaggtaaagaatcgtgtgagggtgggactgtctactgagtagcctcctcagattcattgaactaggtctgtcccaatgtatgggatggcggatagtaagtt

SEQ ID NO: 78410 - DNA, 120 bp, Homo sapiens
  misc_feature: 569 for SV(C|O) and mtDNA
aagtcatcaaaaagctattagtgggagtagagtttgaagtccttgagagaggattatgatgcgactgtgagtgcgttcgtagtttgagtttgctaggcagaatagtaatgaggatgtaag

SEQ ID NO: 78411 - DNA, 120 bp, Homo sapiens; identical to SEQ ID NO: 53772
  misc_feature: 569 for SV(C|O) and mtDNA

SEQ ID NO: 78412 - DNA, 120 bp, Homo sapiens; identical to SEQ ID NO: 58786
  misc_feature: 569 for SV(C|O) and mtDNA

SEQ ID NO: 78413 - DNA, 120 bp, Homo sapiens
  misc_feature: 569 for SV(C|O) and mtDNA
cgactccttgacgttgacaatcgagtagtactcccgattgaagcccccattcgtataataattacatcacaagacgtcttgcactcatgagctgtccccacattaggcttaaaaacagat

SEQ ID NO: 78414 - DNA, 120 bp, Homo sapiens
  misc_feature: 569 for SV(C|O) and mtDNA
cctgtatgcccttttcctaacactcacaacaaaactaactaatactaacatctcagacgctcaggaaatagaaaccgtctgaactatcctgcccgccatcatcctagtcctcatcgccct

SEQ ID NO: 78415 - DNA, 120 bp, Homo sapiens; identical to SEQ ID NO: 62478
  misc_feature: 569 for SV(C|O) and mtDNA

SEQ ID NO: 78416 - DNA, 120 bp, Homo sapiens
  misc_feature: 569 for SV(C|O) and mtDNA
actatcactgttcattatagctactctcataaccctcaacacccactccctcttagccaatattgtgcctattgccatactagtctttgccgcctgcgaagcagcggtgggcctagccct

SEQ ID NO: 78417 - DNA, 120 bp, Homo sapiens
  misc_feature: 568 for SV(C|O) and mtDNA
tgactcacccatcaacaaccgctatgtaattcgtacattactgccagccaccatgaatattgtacggtaccataaatacttgaccacctgtagtacataaaaacccaatccacatcaaaa

SEQ ID NO: 78418 - DNA, 120 bp, Homo sapiens; identical to SEQ ID NO: 61428
  misc_feature: 568 for SV(C|O) and mtDNA

SEQ ID NO: 78419 - DNA, 120 bp, Homo sapiens
  misc_feature: 568 for SV(C|O) and mtDNA
ttctcttccttctctccttaatgacattaacactattctcaccagacctcctaggcgacccagacaattataccctagccaaccccttaaacacccctccccacatcaagcccgaatgat

SEQ ID NO: 78420 - DNA, 120 bp, Homo sapiens; identical to SEQ ID NO: 62822
  misc_feature: 568 for SV(C|O) and mtDNA

SEQ ID NO: 78421 - DNA, 120 bp, Homo sapiens
  misc_feature: 568 for SV(C|O) and mtDNA
cggtttctatctacttcaaattcctccctgtacgaaaggacaagagaaataaggcctacttcacaaagcgccttcccccgtaaatgatatcatctcaacttagtattatacccacaccca

SEQ ID NO: 78422 - DNA, 120 bp, Homo sapiens
  misc_feature: 568 for SV(C|O) and mtDNA
tgggtcccagaggttacccaaggcacccctctgacatccggcctgcttcttctcacatgacaaaaactagcccccatctcaatcatataccaaatctctccctcactaaacgtaagcctt

SEQ ID NO: 78423 - DNA, 120 bp, Homo sapiens
  misc_feature: 568 for SV(C|O) and mtDNA
tggcggtgcttcatatccctctagaggagcctgttctgtaatcgataaaccccgatcaacctcaccacctcttgctcagcctatataccgccatcttcagcaaaccctgatgaaggctac

SEQ ID NO: 78424 - DNA, 120 bp, Homo sapiens
  misc_feature: 568 for SV(C|O) and mtDNA
tcaactaggactcataatagttacaatcggcatcaaccaaccacacctagcattcctgcacatctgtacccacgccttcttcaaagccatactatttatgtgctccgggtccatcatcca

SEQ ID NO: 78425 - DNA, 120 bp, Homo sapiens
  misc_feature: 568 for SV(C|O) and mtDNA
tggagtgtggcgagtcagctaaatactttgacgccggtggggatagcgatgattatggtagcggaggtgaaatatgctcgtgtgtctacgtctattcctactgtaaatatatggtgtgct

SEQ ID NO: 78426 - DNA, 120 bp, Homo sapiens; identical to SEQ ID NO: 59304
  misc_feature: 568 for SV(C|O) and mtDNA

SEQ ID NO: 78427 - DNA, 120 bp, Homo sapiens
  misc_feature: 568 for SV(C|O) and mtDNA
gagtgtggcgagtcagctaaatactttgacgccggtggggatagcgatgattatggtagcggaggtgaaatatgctcgtgtgtctacgtctattcctactgtaaatatatggtgtgctca

SEQ ID NO: 78428 - DNA, 120 bp, Homo sapiens; identical to SEQ ID NO: 63215
  misc_feature: 568 for SV(C|O) and mtDNA

SEQ ID NO: 78429 - DNA, 120 bp, Homo sapiens
  misc_feature: 568 for SV(C|O) and mtDNA
tccttgagagaggattatgatgcgactgtgagtgcgttcgtagtttgagtttgctaggcagaatagtaatgaggatgtaagtccgtgggcgattatgagaatgactgcgccggtgaagct

SEQ ID NO: 78430 - DNA, 120 bp, Homo sapiens
  misc_feature: 568 for SV(C|O) and mtDNA
tcaacatactagtcacagccctatactccctctacatatttaccacaacacaatggggctcactcacccaccacattaacaacataaaaccctcattcacacgagaaaacaccctcatgt

SEQ ID NO: 78431 - DNA, 120 bp, Homo sapiens
  misc_feature: 568 for SV(C|O) and mtDNA
tattcttgcacgaaacgggatcaaacaaccccctaggaatcacctcccattccgataaaatcaccttccacccttactacacaatcaaagacgccctcggcttacttctcttccttctct

SEQ ID NO: 78432 - DNA, 120 bp, Homo sapiens
  misc_feature: 568 for SV(C|O) and mtDNA
acttctaacctccctgttcttatgaattcgaacagcatacccccgattccgctacgaccaactcatacacctcctatgaaaaaacttcctaccactcaccctagcattacttatatgata

SEQ ID NO: 78433 - DNA, 120 bp, Homo sapiens; identical to SEQ ID NO: 62653
  misc_feature: 568 for SV(C|O) and mtDNA

SEQ ID NO: 78434 - DNA, 120 bp, Homo sapiens; identical to SEQ ID NO: 62675
  misc_feature: 568 for SV(C|O) and mtDNA

SEQ ID NO: 78435 - DNA, 120 bp, Homo sapiens
  misc_feature: 568 for SV(C|O) and mtDNA
acaaccacccacagcctaattattagcatcatccctctactattttttaaccaaatcaacaacaacctatttagctgttccccaaccttttcctccgaccccctaacaacccccctccta

SEQ ID NO: 78436 - DNA, 120 bp, Homo sapiens
  misc_feature: 568 for SV(C|O) and mtDNA
tacttctaacctccctgttcttatgaattcgaacagcatacccccgattccgctacgaccaactcatacacctcctatgaaaaaacttcctaccactcaccctagcattacttatatgat

SEQ ID NO: 78437 - DNA, 120 bp, Homo sapiens; identical to SEQ ID NO: 59585
  misc_feature: 568 for SV(C|O) and mtDNA

SEQ ID NO: 78438 - DNA, 120 bp, Homo sapiens
  misc_feature: 568 for SV(C|O) and mtDNA
taacaaaaaaaactcatacccccattatgtaaaatccattgtcgcatccacctttattatcagtctcttccccacaacaatattcatgtgcctagaccaagaagttattatctcgaactg

SEQ ID NO: 78439 - DNA, 120 bp, Homo sapiens
  misc_feature: 568 for SV(C|O) and mtDNA
gtggaaggtgattttatcggaatgggaggtgattcctagggggttgtttgatcccgtttcgtgcaagaataggaggtggagtgctgctagggctgcaataatgaagggcaagatgaagtg

SEQ ID NO: 78440 - DNA, 120 bp, Homo sapiens
  misc_feature: 568 for SV(C|O) and mtDNA
catgatcacgccctcataatcattttccttatctgcttcctagtcctgtatgcccttttcctaacactcacaacaaaactaactaatactaacatctcagacgctcaggaaatagaaacc

SEQ ID NO: 78441 - DNA, 120 bp, Homo sapiens
  misc_feature: 568 for SV(C|O) and mtDNA
caaatgcatggagagctcccgtgagtggttaatagggtgatagacctgtgatccatcgtgatgtcttatttaaggggaacgtgtgggctatttaggctttatggccctgaagtaggaacc

SEQ ID NO: 78442 - DNA, 120 bp, Homo sapiens
  misc_feature: 568 for SV(C|O) and mtDNA
ggtggaaggtgattttatcggaatgggaggtgattcctagggggttgtttgatcccgtttcgtgcaagaataggaggtggagtgctgctagggctgcaataatgaagggcaagatgaagt

SEQ ID NO: 78443 - DNA, 120 bp, Homo sapiens; identical to SEQ ID NO: 57454
  misc_feature: 568 for SV(C|O) and mtDNA

SEQ ID NO: 78444 - DNA, 120 bp, Homo sapiens
  misc_feature: 568 for SV(C|O) and mtDNA
gggtggaaggtgattttatcggaatgggaggtgattcctagggggttgtttgatcccgtttcgtgcaagaataggaggtggagtgctgctagggctgcaataatgaagggcaagatgaag

SEQ ID NO: 78445 - DNA, 120 bp, Homo sapiens
  misc_feature: 568 for SV(C|O) and mtDNA
cctcttcgtctgatccgtcctaatcacagcagtcctacttctcctatctctcccagtcctagctgctggcatcactatactactaacagaccgcaacctcaacaccaccttcttcgaccc

SEQ ID NO: 78446 - DNA, 120 bp, Homo sapiens
  misc_feature: 568 for SV(C|O) and mtDNA
ggacaaccagtaagctacccttttaccatcattggacaagtagcatccgtactatacttcacaacaatcctaatcctaataccaactatctccctaattgaaaacaaaatactcaaatgg

SEQ ID NO: 78447 - DNA, 120 bp, Homo sapiens
  misc_feature: 568 for SV(C|O) and mtDNA
gcttaaaactcaaaggacctggcggtgcttcatatccctctagaggagcctgttctgtaatcgataaaccccgatcaacctcaccacctcttgctcagcctatataccgccatcttcagc

SEQ ID NO: 78448 - DNA, 120 bp, Homo sapiens; identical to SEQ ID NO: 55294
  misc_feature: 568 for SV(C|O) and mtDNA

SEQ ID NO: 78449 - DNA, 120 bp, Homo sapiens; identical to SEQ ID NO: 62465
  misc_feature: 568 for SV(C|O) and mtDNA

SEQ ID NO: 78450 - DNA, 120 bp, Homo sapiens
  misc_feature: 568 for SV(C|O) and mtDNA
gcacatgaatattgttgtggggaagagactgataataaaggtggatgcgacaatggattttacataatgggggtatgagttttttttgttagggttaacgagggtggtaaggatgggggg

SEQ ID NO: 78451 - DNA, 120 bp, Homo sapiens
  misc_feature: 568 for SV(C|O) and mtDNA
gagaggattatgatgcgactgtgagtgcgttcgtagtttgagtttgctaggcagaatagtaatgaggatgtaagtccgtgggcgattatgagaatgactgcgccggtgaagcttcagggg

SEQ ID NO: 78452 - DNA, 120 bp, Homo sapiens
  misc_feature: 568 for SV(C|O) and mtDNA
gaataggaggtggagtgctgctagggctgcaataatgaagggcaagatgaagtgaaaggtaaagaatcgtgtgagggtgggactgtctactgagtagcctcctcagattcattgaactag

SEQ ID NO: 78453 - DNA, 120 bp, Homo sapiens; identical to SEQ ID NO: 62840
  misc_feature: 568 for SV(C|O) and mtDNA

SEQ ID NO: 78454 - DNA, 120 bp, Homo sapiens
  misc_feature: 568 for SV(C|O) and mtDNA
agtccttgagagaggattatgatgcgactgtgagtgcgttcgtagtttgagtttgctaggcagaatagtaatgaggatgtaagtccgtgggcgattatgagaatgactgcgccggtgaag

SEQ ID NO: 78455 - DNA, 120 bp, Homo sapiens
  misc_feature: 568 for SV(C|O) and mtDNA
acaatatactctccggacaatgaaccataaccaatactaccaatcaatactcatcattaataatcataatggctatagcaataaaactaggaatagccccctttcacttctgggtcccag

SEQ ID NO: 78456 - DNA, 120 bp, Homo sapiens
  misc_feature: 568 for SV(C|O) and mtDNA
agtgcgagcttagcgctgtgatgagtgtgcctgcaaagatggtagagtagatgacgggttgggccaggggattaattagtacgggaagggtataaccaacattttcggggtatgggcccg

SEQ ID NO: 78457 - DNA, 120 bp, Homo sapiens
  misc_feature: 568 for SV(C|O) and mtDNA
ccccaccccagtctcagccctactccactcaagcactatagttgtagcaggaatcttcttactcatccgcttccaccccctagcagaaaatagcccactaatccaaactctaacactatg

SEQ ID NO: 78458 - DNA, 120 bp, Homo sapiens
  misc_feature: 568 for SV(C|O) and mtDNA
cactcatgagctgtccccacattaggcttaaaaacagatgcaattcccggacgtctaaaccaaaccactttcaccgctacacgaccgggggtatactacggtcaatgctctgaaatctgt

SEQ ID NO: 78459 - DNA, 120 bp, Homo sapiens; identical to SEQ ID NO: 56065
  misc_feature: 568 for SV(C|O) and mtDNA

SEQ ID NO: 78460 - DNA, 120 bp, Homo sapiens; identical to SEQ ID NO: 55453
  misc_feature: 568 for SV(C|O) and mtDNA

SEQ ID NO: 78461 - DNA, 120 bp, Homo sapiens
  misc_feature: 568 for SV(C|O) and mtDNA
aatagctttttgatgacttctagcaagcctcgctaacctcgccttaccccccactattaacctactgggagaactctctgtgctagtaaccacgttctcctgatcaaatatcactctcct

SEQ ID NO: 78462 - DNA, 120 bp, Homo sapiens; identical to SEQ ID NO: 62247
  misc_feature: 568 for SV(C|O) and mtDNA

SEQ ID NO: 78463 - DNA, 120 bp, Homo sapiens
  misc_feature: 567 for SV(C|O) and mtDNA
ttcatgatcacgccctcataatcattttccttatctgcttcctagtcctgtatgcccttttcctaacactcacaacaaaactaactaatactaacatctcagacgctcaggaaatagaaa

SEQ ID NO: 78464 - DNA, 120 bp, Homo sapiens
  misc_feature: 567 for SV(C|O) and mtDNA
ttgcactcatgagctgtccccacattaggcttaaaaacagatgcaattcccggacgtctaaaccaaaccactttcaccgctacacgaccgggggtatactacggtcaatgctctgaaatc

SEQ ID NO: 78465 - DNA, 120 bp, Homo sapiens
  misc_feature: 567 for SV(C|O) and mtDNA
ttgaagtccttgagagaggattatgatgcgactgtgagtgcgttcgtagtttgagtttgctaggcagaatagtaatgaggatgtaagtccgtgggcgattatgagaatgactgcgccggt

SEQ ID NO: 78466 - DNA, 120 bp, Homo sapiens
  misc_feature: 567 for SV(C|O) and mtDNA
gcaagaataggaggtggagtgctgctagggctgcaataatgaagggcaagatgaagtgaaaggtaaagaatcgtgtgagggtgggactgtctactgagtagcctcctcagattcattgaa

SEQ ID NO: 78467 - DNA, 120 bp, Homo sapiens
  misc_feature: 567 for SV(C|O) and mtDNA
tcaacaaccgctatgtaattcgtacattactgccagccaccatgaatattgtacggtaccataaatacttgaccacctgtagtacataaaaacccaatccacatcaaaaccccctcccca

SEQ ID NO: 78468 - DNA, 120 bp, Homo sapiens
  misc_feature: 567 for SV(C|O) and mtDNA
aacaatatactctccggacaatgaaccataaccaatactaccaatcaatactcatcattaataatcataatggctatagcaataaaactaggaatagccccctttcacttctgggtccca

SEQ ID NO: 78469 - DNA, 120 bp, Homo sapiens; identical to SEQ ID NO: 58551
  misc_feature: 567 for SV(C|O) and mtDNA

SEQ ID NO: 78470 - DNA, 120 bp, Homo sapiens
  misc_feature: 567 for SV(C|O) and mtDNA
tgatgacttctagcaagcctcgctaacctcgccttaccccccactattaacctactgggagaactctctgtgctagtaaccacgttctcctgatcaaatatcactctcctacttacagga

SEQ ID NO: 78471 - DNA, 120 bp, Homo sapiens
  misc_feature: 567 for SV(C|O) and mtDNA
cctgcttgcaactatagcaacagccttcataggctatgtcctcccgtgaggccaaatatcattctgaggggccacagtaattacaaacttactatccgccatcccatacattgggacaga

SEQ ID NO: 78472 - DNA, 120 bp, Homo sapiens
  misc_feature: 567 for SV(C|O) and mtDNA
ctagcacagagagttctcccagtaggttaatagtggggggtaaggcgaggttagcgaggcttgctagaagtcatcaaaaagctattagtgggagtagagtttgaagtccttgagagagga

SEQ ID NO: 78473 - DNA, 120 bp, Homo sapiens; identical to SEQ ID NO: 62091
  misc_feature: 567 for SV(C|O) and mtDNA

SEQ ID NO: 78474 - DNA, 120 bp, Homo sapiens
  misc_feature: 567 for SV(C|O) and mtDNA
cttgcaactatagcaacagccttcataggctatgtcctcccgtgaggccaaatatcattctgaggggccacagtaattacaaacttactatccgccatcccatacattgggacagaccta

SEQ ID NO: 78475 - DNA, 120 bp, Homo sapiens; identical to SEQ ID NO: 61577
  misc_feature: 567 for SV(C|O) and mtDNA

SEQ ID NO: 78476 - DNA, 120 bp, Homo sapiens
  misc_feature: 567 for SV(C|O) and mtDNA
tactatccgccatcccatacattgggacagacctagttcaatgaatctgaggaggctactcagtagacagtcccaccctcacacgattctttacctttcacttcatcttgcccttcatta

SEQ ID NO: 78477 - DNA, 120 bp, Homo sapiens
  misc_feature: 567 for SV(C|O) and mtDNA
caacatatgacgcactctcccctgaactctacacaacatattttgtcaccaagaccctacttctaacctccctgttcttatgaattcgaacagcatacccccgattccgctacgaccaac

SEQ ID NO: 78478 - DNA, 120 bp, Homo sapiens
  misc_feature: 567 for SV(C|O) and mtDNA
gtggtctttggagtagaaacctgtgaggaaaggtattcctgctaatgctaggctgccaatggtgagggaggttgaagtgagaggtatggttttgagtagtcctcctatttttcggatatc

SEQ ID NO: 78479 - DNA, 120 bp, Homo sapiens; identical to SEQ ID NO: 62756
  misc_feature: 567 for SV(C|O) and mtDNA

SEQ ID NO: 78480 - DNA, 120 bp, Homo sapiens; identical to SEQ ID NO: 61552
  misc_feature: 567 for SV(C|O) and mtDNA

SEQ ID NO: 78481 - DNA, 120 bp, Homo sapiens
  misc_feature: 567 for SV(C|O) and mtDNA
cttctgactcttacctccctctctcctactcctgctcgcatctgctatagtggaggccggagcaggaacaggttgaacagtctaccctcccttagcagggaactactcccaccctggagc

SEQ ID NO: 78482 - DNA, 120 bp, Homo sapiens; identical to SEQ ID NO: 57020
  misc_feature: 567 for SV(C|O) and mtDNA

SEQ ID NO: 78483 - DNA, 120 bp, Homo sapiens; identical to SEQ ID NO: 59410
  misc_feature: 567 for SV(C|O) and mtDNA

SEQ ID NO: 78484 - DNA, 120 bp, Homo sapiens
  misc_feature: 567 for SV(C|O) and mtDNA
atcagtgcgagcttagcgctgtgatgagtgtgcctgcaaagatggtagagtagatgacgggttgggccaggggattaattagtacgggaagggtataaccaacattttcggggtatgggc

SEQ ID NO: 78485 - DNA, 120 bp, Homo sapiens
  misc_feature: 567 for SV(C|O) and mtDNA
gcagataaagaatattgaggcgccattggcgtgaaggtagcggatgattcagccataatttacgtctcgagtgatgtgggcgattgatgaaaaggcggttgaggcgtctggtgagtagtg

SEQ ID NO: 78486 - DNA, 120 bp, Homo sapiens
  misc_feature: 567 for SV(C|O) and mtDNA
gcactcatgagctgtccccacattaggcttaaaaacagatgcaattcccggacgtctaaaccaaaccactttcaccgctacacgaccgggggtatactacggtcaatgctctgaaatctg

SEQ ID NO: 78487 - DNA, 120 bp, Homo sapiens; identical to SEQ ID NO: 63247
  misc_feature: 567 for SV(C|O) and mtDNA

SEQ ID NO: 78488 - DNA, 120 bp, Homo sapiens
  misc_feature: 567 for SV(C|O) and mtDNA
ctattactatccatcctcatcctagcaataatccccatcctccatatatccaaacaacaaagcataatatttcgcccactaagccaatcactttattgactcctagccgcagacctcctc

SEQ ID NO: 78489 - DNA, 120 bp, Homo sapiens
  misc_feature: 567 for SV(C|O) and mtDNA
caactatagcaacagccttcataggctatgtcctcccgtgaggccaaatatcattctgaggggccacagtaattacaaacttactatccgccatcccatacattgggacagacctagttc

SEQ ID NO: 78490 - DNA, 120 bp, Homo sapiens
  misc_feature: 567 for SV(C|O) and mtDNA
gaaaaaaggcgggagaagccccggcaggtttgaagctgcttcttcgaatttgcaattcaatatgaaaatcacctcggagctggtaaaaagaggcctaacccctgtctttagatttacagt

SEQ ID NO: 78491 - DNA, 120 bp, Homo sapiens; identical to SEQ ID NO: 62667
  misc_feature: 567 for SV(C|O) and mtDNA

SEQ ID NO: 78492 - DNA, 120 bp, Homo sapiens; identical to SEQ ID NO: 58839
  misc_feature: 567 for SV(C|O) and mtDNA

SEQ ID NO: 78493 - DNA, 120 bp, Homo sapiens
  misc_feature: 567 for SV(C|O) and mtDNA
ctatccgccatcccatacattgggacagacctagttcaatgaatctgaggaggctactcagtagacagtcccaccctcacacgattctttacctttcacttcatcttgcccttcattatt

SEQ ID NO: 78494 - DNA, 120 bp, Homo sapiens
  misc_feature: 567 for SV(C|O) and mtDNA
cctacttctaacctccctgttcttatgaattcgaacagcatacccccgattccgctacgaccaactcatacacctcctatgaaaaaacttcctaccactcaccctagcattacttatatg

SEQ ID NO: 78495 - DNA, 120 bp, Homo sapiens
  misc_feature: 567 for SV(C|O) and mtDNA
cctaatctactccacctcaatcacactactccccatatctaacaacgtaaaaataaaatgacagtttgaacatacaaaacccaccccattcctccccacactcatcgcccttaccacgct

SEQ ID NO: 78496 - DNA, 120 bp, Homo sapiens
  misc_feature: 567 for SV(C|O) and mtDNA
actcatgagctgtccccacattaggcttaaaaacagatgcaattcccggacgtctaaaccaaaccactttcaccgctacacgaccgggggtatactacggtcaatgctctgaaatctgtg

SEQ ID NO: 78497 - DNA, 120 bp, Homo sapiens
  misc_feature: 567 for SV(C|O) and mtDNA
caacaaccgctatgtaattcgtacattactgccagccaccatgaatattgtacggtaccataaatacttgaccacctgtagtacataaaaacccaatccacatcaaaaccccctccccat

SEQ ID NO: 78498 - DNA, 120 bp, Homo sapiens
  misc_feature: 567 for SV(C|O) and mtDNA
atgcccatcgtcctagaattaattcccctaaaaatctttgaaatagggcccgtatttaccctatagcaccccctctaccccctctagagcccactgtaaagctaacttagcattaacctt

SEQ ID NO: 78499 - DNA, 120 bp, Homo sapiens; identical to SEQ ID NO: 63246
  misc_feature: 567 for SV(C|O) and mtDNA

SEQ ID NO: 78500 - DNA, 120 bp, Homo sapiens
  misc_feature: 567 for SV(C|O) and mtDNA
acgatgtctagtgatgagtttgctaatacaatgccagtcaggccgcctacggtgaaaagaaagatgaatcctagggctcagagcactgcagcagatcatttcatattgcttccgtggagt

SEQ ID NO: 78501 - DNA, 120 bp, Homo sapiens
  misc_feature: 566 for SV(C|O) and mtDNA
tctacctaaaactcacagccctcgctgtcactttcctaggacttctaacagccctagacctcaactacctaaccaacaaacttaaaataaaatccccactatgcacattttatttctcca

SEQ ID NO: 78502 - DNA, 120 bp, Homo sapiens
  misc_feature: 566 for SV(C|O) and mtDNA
cacccaaatctgcttccccatgaaagaacagagaatagtttaaattagaatcttagctttgggtgctaatggtggagttaaagactttttctctgatttgtccttggaaaaaggttttca

SEQ ID NO: 78503 - DNA, 120 bp, Homo sapiens
  misc_feature: 566 for SV(C|O) and mtDNA
aaaactaactaatactaacatctcagacgctcaggaaatagaaaccgtctgaactatcctgcccgccatcatcctagtcctcatcgccctcccatccctgcgcatcctttacataacaga

SEQ ID NO: 78504 - DNA, 120 bp, Homo sapiens
  misc_feature: 566 for SV(C|O) and mtDNA
tctaggcacatgaatattgttgtggggaagagactgataataaaggtggatgcgacaatggattttacataatgggggtatgagttttttttgttagggttaacgagggtggtaaggatg

SEQ ID NO: 78505 - DNA, 120 bp, Homo sapiens
  misc_feature: 566 for SV(C|O) and mtDNA
tcggcatcaaccaaccacacctagcattcctgcacatctgtacccacgccttcttcaaagccatactatttatgtgctccgggtccatcatccacaaccttaacaatgaacaagatatcc

SEQ ID NO: 78506 - DNA, 120 bp, Homo sapiens
  misc_feature: 566 for SV(C|O) and mtDNA
aaaaataggaggactactcaaaaccatacctctcacttcaacctccctcaccattggcagcctagcattagcaggaatacctttcctcacaggtttctactccaaagaccacatcatcga

SEQ ID NO: 78507 - DNA, 120 bp, Homo sapiens
  misc_feature: 566 for SV(C|O) and mtDNA
tatcatacacaaacgcctgagccctatctattactctcatcgctacctccctgacaagcgcctatagcactcgaataattcttctcaccctaacaggtcaacctcgcttccccaccctta

SEQ ID NO: 78508 - DNA, 120 bp, Homo sapiens
  misc_feature: 566 for SV(C|O) and mtDNA
cctgcgactccttgacgttgacaatcgagtagtactcccgattgaagcccccattcgtataataattacatcacaagacgtcttgcactcatgagctgtccccacattaggcttaaaaac

SEQ ID NO: 78509 - DNA, 120 bp, Homo sapiens
  misc_feature: 566 for SV(C|O) and mtDNA
gactcacccatcaacaaccgctatgtaattcgtacattactgccagccaccatgaatattgtacggtaccataaatacttgaccacctgtagtacataaaaacccaatccacatcaaaac

SEQ ID NO: 78510 - DNA, 120 bp, Homo sapiens
  misc_feature: 566 for SV(C|O) and mtDNA
gtgcacaccccccagacgaaaataccaaatgcatggagagctcccgtgagtggttaatagggtgatagacctgtgatccatcgtgatgtcttatttaaggggaacgtgtgggctatttag

SEQ ID NO: 78511 - DNA, 120 bp, Homo sapiens
  misc_feature: 566 for SV(C|O) and mtDNA
gatgacttctagcaagcctcgctaacctcgccttaccccccactattaacctactgggagaactctctgtgctagtaaccacgttctcctgatcaaatatcactctcctacttacaggac

SEQ ID NO: 78512 - DNA, 120 bp, Homo sapiens
  misc_feature: 566 for SV(C|O) and mtDNA
gtatgcccttttcctaacactcacaacaaaactaactaatactaacatctcagacgctcaggaaatagaaaccgtctgaactatcctgcccgccatcatcctagtcctcatcgccctccc

SEQ ID NO: 78513 - DNA, 120 bp, Homo sapiens
  misc_feature: 566 for SV(C|O) and mtDNA
cacccatcaacaaccgctatgtaattcgtacattactgccagccaccatgaatattgtacggtaccataaatacttgaccacctgtagtacataaaaacccaatccacatcaaaaccccc

SEQ ID NO: 78514 - DNA, 120 bp, Homo sapiens
  misc_feature: 566 for SV(C|O) and mtDNA
ctctacctaaaactcacagccctcgctgtcactttcctaggacttctaacagccctagacctcaactacctaaccaacaaacttaaaataaaatccccactatgcacattttatttctcc

SEQ ID NO: 78515 - DNA, 120 bp, Homo sapiens
  misc_feature: 566 for SV(C|O) and mtDNA
gctactgctcgcagtgcgccgatcagggcgtagtttgagtttgatgctcaccctgatcagaggattgagtaaacggctaggctagaggtggctagaataaataggaggcctaggttgagg

SEQ ID NO: 78516 - DNA, 120 bp, Homo sapiens; identical to SEQ ID NO: 58488
  misc_feature: 566 for SV(C|O) and mtDNA

SEQ ID NO: 78517 - DNA, 120 bp, Homo sapiens
  misc_feature: 566 for SV(C|O) and mtDNA
ctaacaaaaaaaactcatacccccattatgtaaaatccattgtcgcatccacctttattatcagtctcttccccacaacaatattcatgtgcctagaccaagaagttattatctcgaact

SEQ ID NO: 78518 - DNA, 120 bp, Homo sapiens
  misc_feature: 566 for SV(C|O) and mtDNA
atactctccggacaatgaaccataaccaatactaccaatcaatactcatcattaataatcataatggctatagcaataaaactaggaatagccccctttcacttctgggtcccagaggtt

SEQ ID NO: 78519 - DNA, 120 bp, Homo sapiens
  misc_feature: 565 for SV(C|O) and mtDNA
tttgggcaaaaagccggttagcgggggcaggcctcctagggagaggagggtggatggaattaagggtgttagtcatgttagcttgtttcaggtgcgagatagtagtagggtcgtggtgct

SEQ ID NO: 78520 - DNA, 120 bp, Homo sapiens
  misc_feature: 565 for SV(C|O) and mtDNA
tgggagtagagtttgaagtccttgagagaggattatgatgcgactgtgagtgcgttcgtagtttgagtttgctaggcagaatagtaatgaggatgtaagtccgtgggcgattatgagaat

SEQ ID NO: 78521 - DNA, 120 bp, Homo sapiens
  misc_feature: 565 for SV(C|O) and mtDNA
tgcatggagagctcccgtgagtggttaatagggtgatagacctgtgatccatcgtgatgtcttatttaaggggaacgtgtgggctatttaggctttatggccctgaagtaggaaccagat

SEQ ID NO: 78522 - DNA, 120 bp, Homo sapiens; identical to SEQ ID NO: 58079
  misc_feature: 565 for SV(C|O) and mtDNA

SEQ ID NO: 78523 - DNA, 120 bp, Homo sapiens
  misc_feature: 565 for SV(C|O) and mtDNA
ggtctaggcacatgaatattgttgtggggaagagactgataataaaggtggatgcgacaatggattttacataatgggggtatgagttttttttgttagggttaacgagggtggtaagga

SEQ ID NO: 78524 - DNA, 120 bp, Homo sapiens
  misc_feature: 565 for SV(C|O) and mtDNA
ctaatccaaactctaacactatgcttaggcgctatcaccactctgttcgcagcagtctgcgcccttacacaaaatgacatcaaaaaaatcgtagccttctccacttcaagtcaactagga

SEQ ID NO: 78525 - DNA, 120 bp, Homo sapiens
  misc_feature: 565 for SV(C|O) and mtDNA
aagggtggaaggtgattttatcggaatgggaggtgattcctagggggttgtttgatcccgtttcgtgcaagaataggaggtggagtgctgctagggctgcaataatgaagggcaagatga

SEQ ID NO: 78526 - DNA, 120 bp, Homo sapiens
  misc_feature: 565 for SV(C|O) and mtDNA
aacaaaaaaaactcatacccccattatgtaaaatccattgtcgcatccacctttattatcagtctcttccccacaacaatattcatgtgcctagaccaagaagttattatctcgaactga

SEQ ID NO: 78527 - DNA, 120 bp, Homo sapiens
  misc_feature: 565 for SV(C|O) and mtDNA
tcagcttcctacactattaaagtttaccacaaccaccaccccatcatactctttcacccacagcaccaatcctacctccatcgctaaccccactaaaacactcaccaagacctcaacccc

SEQ ID NO: 78528 - DNA, 120 bp, Homo sapiens
  misc_feature: 565 for SV(C|O) and mtDNA
tcacccatcaacaaccgctatgtaattcgtacattactgccagccaccatgaatattgtacggtaccataaatacttgaccacctgtagtacataaaaacccaatccacatcaaaacccc

SEQ ID NO: 78529 - DNA, 120 bp, Homo sapiens
  misc_feature: 565 for SV(C|O) and mtDNA
gatggacccggagcacataaatagtatggctttgaagaaggcgtgggtacagatgtgcaggaatgctaggtgtggttggttgatgccgattgtaactattatgagtcctagttgacttga

SEQ ID NO: 78530 - DNA, 120 bp, Homo sapiens
  misc_feature: 565 for SV(C|O) and mtDNA
catacacaaacgcctgagccctatctattactctcatcgctacctccctgacaagcgcctatagcactcgaataattcttctcaccctaacaggtcaacctcgcttccccacccttacta

SEQ ID NO: 78531 - DNA, 120 bp, Homo sapiens
  misc_feature: 565 for SV(C|O) and mtDNA
taatagctttttgatgacttctagcaagcctcgctaacctcgccttaccccccactattaacctactgggagaactctctgtgctagtaaccacgttctcctgatcaaatatcactctcc

SEQ ID NO: 78532 - DNA, 120 bp, Homo sapiens
  misc_feature: 565 for SV(C|O) and mtDNA
caagaataggaggtggagtgctgctagggctgcaataatgaagggcaagatgaagtgaaaggtaaagaatcgtgtgagggtgggactgtctactgagtagcctcctcagattcattgaac

SEQ ID NO: 78533 - DNA, 120 bp, Homo sapiens
  misc_feature: 565 for SV(C|O) and mtDNA
gtgtcgtgtagtacgatgtctagtgatgagtttgctaatacaatgccagtcaggccgcctacggtgaaaagaaagatgaatcctagggctcagagcactgcagcagatcatttcatattg

SEQ ID NO: 78534 - DNA, 120 bp, Homo sapiens
  misc_feature: 565 for SV(C|O) and mtDNA
gacgccctcggcttacttctcttccttctctccttaatgacattaacactattctcaccagacctcctaggcgacccagacaattataccctagccaaccccttaaacacccctccccac

SEQ ID NO: 78535 - DNA, 120 bp, Homo sapiens
  misc_feature: 565 for SV(C|O) and mtDNA
atcatacacaaacgcctgagccctatctattactctcatcgctacctccctgacaagcgcctatagcactcgaataattcttctcaccctaacaggtcaacctcgcttccccacccttac

SEQ ID NO: 78536 - DNA, 120 bp, Homo sapiens; identical to SEQ ID NO: 54067
  misc_feature: 565 for SV(C|O) and mtDNA

SEQ ID NO: 78537 - DNA, 120 bp, Homo sapiens
  misc_feature: 565 for SV(C|O) and mtDNA
gggggcaatgaatgaagcgaacagattttcgttcattttggttctcagggtttgttataattttttatttttatgggctttggtgagggaggtaggtggtagtttgtgtttaatattttt

SEQ ID NO: 78538 - DNA, 120 bp, Homo sapiens
  misc_feature: 565 for SV(C|O) and mtDNA
gggacagctcatgagtgcaagacgtcttgtgatgtaattattatacgaatgggggcttcaatcgggagtactactcgattgtcaacgtcaaggagtcgcaggtcgcctggttctaggaat

SEQ ID NO: 78539 - DNA, 120 bp, Homo sapiens; identical to SEQ ID NO: 59218
  misc_feature: 565 for SV(C|O) and mtDNA

SEQ ID NO: 78540 - DNA, 120 bp, Homo sapiens; identical to SEQ ID NO: 62602
  misc_feature: 565 for SV(C|O) and mtDNA

SEQ ID NO: 78541 - DNA, 120 bp, Homo sapiens
  misc_feature: 565 for SV(C|O) and mtDNA
ggcagataaagaatattgaggcgccattggcgtgaaggtagcggatgattcagccataatttacgtctcgagtgatgtgggcgattgatgaaaaggcggttgaggcgtctggtgagtagt

SEQ ID NO: 78542 - DNA, 120 bp, Homo sapiens; identical to SEQ ID NO: 59204
  misc_feature: 565 for SV(C|O) and mtDNA

SEQ ID NO: 78543 - DNA, 120 bp, Homo sapiens
  misc_feature: 565 for SV(C|O) and mtDNA
acaaccagtaagctacccttttaccatcattggacaagtagcatccgtactatacttcacaacaatcctaatcctaataccaactatctccctaattgaaaacaaaatactcaaatgggc

SEQ ID NO: 78544 - DNA, 120 bp, Homo sapiens; identical to SEQ ID NO: 53637
  misc_feature: 565 for SV(C|O) and mtDNA

SEQ ID NO: 78545 - DNA, 120 bp, Homo sapiens
  misc_feature: 565 for SV(C|O) and mtDNA
ctaacctccctgttcttatgaattcgaacagcatacccccgattccgctacgaccaactcatacacctcctatgaaaaaacttcctaccactcaccctagcattacttatatgatatgtc

SEQ ID NO: 78546 - DNA, 120 bp, Homo sapiens
  misc_feature: 565 for SV(C|O) and mtDNA
cttgcacgaaacgggatcaaacaaccccctaggaatcacctcccattccgataaaatcaccttccacccttactacacaatcaaagacgccctcggcttacttctcttccttctctcctt

SEQ ID NO: 78547 - DNA, 120 bp, Homo sapiens; identical to SEQ ID NO: 58971
  misc_feature: 565 for SV(C|O) and mtDNA

SEQ ID NO: 78548 - DNA, 120 bp, Homo sapiens; identical to SEQ ID NO: 62818
  misc_feature: 565 for SV(C|O) and mtDNA

SEQ ID NO: 78549 - DNA, 120 bp, Homo sapiens; identical to SEQ ID NO: 62670
  misc_feature: 565 for SV(C|O) and mtDNA

SEQ ID NO: 78550 - DNA, 120 bp, Homo sapiens
  misc_feature: 565 for SV(C|O) and mtDNA
ctagaagtcatcaaaaagctattagtgggagtagagtttgaagtccttgagagaggattatgatgcgactgtgagtgcgttcgtagtttgagtttgctaggcagaatagtaatgaggatg

SEQ ID NO: 78551 - DNA, 120 bp, Homo sapiens
  misc_feature: 565 for SV(C|O) and mtDNA
cccactaatccaaactctaacactatgcttaggcgctatcaccactctgttcgcagcagtctgcgcccttacacaaaatgacatcaaaaaaatcgtagccttctccacttcaagtcaact

SEQ ID NO: 78552 - DNA, 120 bp, Homo sapiens
  misc_feature: 565 for SV(C|O) and mtDNA
aaatcagtgcgagcttagcgctgtgatgagtgtgcctgcaaagatggtagagtagatgacgggttgggccaggggattaattagtacgggaagggtataaccaacattttcggggtatgg

SEQ ID NO: 78553 - DNA, 120 bp, Homo sapiens
  misc_feature: 565 for SV(C|O) and mtDNA
cagcagcaggcaaatcagcccaattaggtctccacccctgactcccctcagccatagaaggccccaccccagtctcagccctactccactcaagcactatagttgtagcaggaatcttct

SEQ ID NO: 78554 - DNA, 120 bp, Homo sapiens
  misc_feature: 565 for SV(C|O) and mtDNA
aggaggggggttgttagggggtcggaggaaaaggttggggaacagctaaataggttgttgttgatttggttaaaaaatagtagagggatgatgctaataattaggctgtgggtggttgtg

SEQ ID NO: 78555 - DNA, 120 bp, Homo sapiens
  misc_feature: 565 for SV(C|O) and mtDNA
aaagactagtatggcaataggcacaatattggctaagagggagtgggtgttgagggttatgagagtagctataatgaacagtgatagtattattccttctaggcatagtagggaggatat

SEQ ID NO: 78556 - DNA, 120 bp, Homo sapiens; identical to SEQ ID NO: 62509
  misc_feature: 565 for SV(C|O) and mtDNA

SEQ ID NO: 78557 - DNA, 120 bp, Homo sapiens
  misc_feature: 565 for SV(C|O) and mtDNA
aaccagtaagctacccttttaccatcattggacaagtagcatccgtactatacttcacaacaatcctaatcctaataccaactatctccctaattgaaaacaaaatactcaaatgggcct

SEQ ID NO: 78558 - DNA, 120 bp, Homo sapiens
  misc_feature: 564 for SV(C|O) and mtDNA
actatagcaacagccttcataggctatgtcctcccgtgaggccaaatatcattctgaggggccacagtaattacaaacttactatccgccatcccatacattgggacagacctagttcaa

SEQ ID NO: 78559 - DNA, 120 bp, Homo sapiens
  misc_feature: 564 for SV(C|O) and mtDNA
acatgaatattgttgtggggaagagactgataataaaggtggatgcgacaatggattttacataatgggggtatgagttttttttgttagggttaacgagggtggtaaggatggggggaa

SEQ ID NO: 78560 - DNA, 120 bp, Homo sapiens; identical to SEQ ID NO: 62655
  misc_feature: 564 for SV(C|O) and mtDNA

SEQ ID NO: 78561 - DNA, 120 bp, Homo sapiens; identical to SEQ ID NO: 54545
  misc_feature: 564 for SV(C|O) and mtDNA

SEQ ID NO: 78562 - DNA, 120 bp, Homo sapiens
  misc_feature: 564 for SV(C|O) and mtDNA
ccatcgtcctagaattaattcccctaaaaatctttgaaatagggcccgtatttaccctatagcaccccctctaccccctctagagcccactgtaaagctaacttagcattaaccttttaa

SEQ ID NO: 78563 - DNA, 120 bp, Homo sapiens
  misc_feature: 564 for SV(C|O) and mtDNA
ctgcgactccttgacgttgacaatcgagtagtactcccgattgaagcccccattcgtataataattacatcacaagacgtcttgcactcatgagctgtccccacattaggcttaaaaaca

SEQ ID NO: 78564 - DNA, 120 bp, Homo sapiens; identical to SEQ ID NO: 62637
  misc_feature: 564 for SV(C|O) and mtDNA

SEQ ID NO: 78565 - DNA, 120 bp, Homo sapiens; identical to SEQ ID NO: 60210
  misc_feature: 564 for SV(C|O) and mtDNA

SEQ ID NO: 78566 - DNA, 120 bp, Homo sapiens
  misc_feature: 564 for SV(C|O) and mtDNA
ccaaaaaggccttcgatacgggataatcctatttattacctcagaagtttttttcttcgcaggatttttctgagccttttaccactccagcctagcccctaccccccaattaggagggca

SEQ ID NO: 78567 - DNA, 120 bp, Homo sapiens
  misc_feature: 564 for SV(C|O) and mtDNA
ctccttgacgttgacaatcgagtagtactcccgattgaagcccccattcgtataataattacatcacaagacgtcttgcactcatgagctgtccccacattaggcttaaaaacagatgca

SEQ ID NO: 78568 - DNA, 120 bp, Homo sapiens
  misc_feature: 564 for SV(C|O) and mtDNA
tccgaaaaataggaggactactcaaaaccatacctctcacttcaacctccctcaccattggcagcctagcattagcaggaatacctttcctcacaggtttctactccaaagaccacatca

SEQ ID NO: 78569 - DNA, 120 bp, Homo sapiens
  misc_feature: 564 for SV(C|O) and mtDNA
gcgactccttgacgttgacaatcgagtagtactcccgattgaagcccccattcgtataataattacatcacaagacgtcttgcactcatgagctgtccccacattaggcttaaaaacaga

SEQ ID NO: 78570 - DNA, 120 bp, Homo sapiens; identical to SEQ ID NO: 56900
  misc_feature: 564 for SV(C|O) and mtDNA

SEQ ID NO: 78571 - DNA, 120 bp, Homo sapiens
  misc_feature: 564 for SV(C|O) and mtDNA
tctgatccgtcctaatcacagcagtcctacttctcctatctctcccagtcctagctgctggcatcactatactactaacagaccgcaacctcaacaccaccttcttcgaccccgccggag

SEQ ID NO: 78572 - DNA, 120 bp, Homo sapiens
  misc_feature: 564 for SV(C|O) and mtDNA
tctctcctactcctgctcgcatctgctatagtggaggccggagcaggaacaggttgaacagtctaccctcccttagcagggaactactcccaccctggagcctccgtagacctaaccatc

SEQ ID NO: 78573 - DNA, 120 bp, Homo sapiens
  misc_feature: 564 for SV(C|O) and mtDNA
tcctaatgcttaccgaacgaaaaattctaggctatatacaactacgcaaaggccccaacgttgtaggcccctacgggctactacaacccttcgctgacgccataaaactcttcaccaaag

SEQ ID NO: 78574 - DNA, 120 bp, Homo sapiens; identical to SEQ ID NO: 60236
  misc_feature: 564 for SV(C|O) and mtDNA

SEQ ID NO: 78575 - DNA, 120 bp, Homo sapiens
  misc_feature: 564 for SV(C|O) and mtDNA
tatgggtttaatagtttttttaatttatttagggggaatgatggttgtctttggatatactacagcgatggctattgaggagtatcctgaggcatgggggtcaggggttgaggtcttggt

SEQ ID NO: 78576 - DNA, 120 bp, Homo sapiens; identical to SEQ ID NO: 57331
  misc_feature: 564 for SV(C|O) and mtDNA

SEQ ID NO: 78577 - DNA, 120 bp, Homo sapiens
  misc_feature: 564 for SV(C|O) and mtDNA
tagcttgtttcaggtgcgagatagtagtagggtcgtggtgctggagtttaagttgagtagtaggaatgcggtagtagttaggataatataaatagttaaattaagaatggttatgttagg

SEQ ID NO: 78578 - DNA, 120 bp, Homo sapiens
  misc_feature: 564 for SV(C|O) and mtDNA
gcacagagagttctcccagtaggttaatagtggggggtaaggcgaggttagcgaggcttgctagaagtcatcaaaaagctattagtgggagtagagtttgaagtccttgagagaggatta

SEQ ID NO: 78579 - DNA, 120 bp, Homo sapiens; identical to SEQ ID NO: 63028
  misc_feature: 564 for SV(C|O) and mtDNA

SEQ ID NO: 78580 - DNA, 120 bp, Homo sapiens
  misc_feature: 564 for SV(C|O) and mtDNA
gtgttattattctgaattttgggggaggttatatgggtttaatagtttttttaatttatttagggggaatgatggttgtctttggatatactacagcgatggctattgaggagtatcctg

SEQ ID NO: 78581 - DNA, 120 bp, Homo sapiens
  misc_feature: 564 for SV(C|O) and mtDNA
caaaaaggccttcgatacgggataatcctatttattacctcagaagtttttttcttcgcaggatttttctgagccttttaccactccagcctagcccctaccccccaattaggagggcac

SEQ ID NO: 78582 - DNA, 120 bp, Homo sapiens
  misc_feature: 564 for SV(C|O) and mtDNA
agtgtggcgagtcagctaaatactttgacgccggtggggatagcgatgattatggtagcggaggtgaaatatgctcgtgtgtctacgtctattcctactgtaaatatatggtgtgctcac

SEQ ID NO: 78583 - DNA, 120 bp, Homo sapiens
  misc_feature: 564 for SV(C|O) and mtDNA
cttgccctattactatccatcctcatcctagcaataatccccatcctccatatatccaaacaacaaagcataatatttcgcccactaagccaatcactttattgactcctagccgcagac

SEQ ID NO: 78584 - DNA, 120 bp, Homo sapiens
  misc_feature: 564 for SV(C|O) and mtDNA
actcacccatcaacaaccgctatgtaattcgtacattactgccagccaccatgaatattgtacggtaccataaatacttgaccacctgtagtacataaaaacccaatccacatcaaaacc

SEQ ID NO: 78585 - DNA, 120 bp, Homo sapiens; identical to SEQ ID NO: 62661
  misc_feature: 564 for SV(C|O) and mtDNA

SEQ ID NO: 78586 - DNA, 120 bp, Homo sapiens
  misc_feature: 564 for SV(C|O) and mtDNA
ctcacccatcaacaaccgctatgtaattcgtacattactgccagccaccatgaatattgtacggtaccataaatacttgaccacctgtagtacataaaaacccaatccacatcaaaaccc

SEQ ID NO: 78587 - DNA, 120 bp, Homo sapiens; identical to SEQ ID NO: 58993
  misc_feature: 564 for SV(C|O) and mtDNA

SEQ ID NO: 78588 - DNA, 120 bp, Homo sapiens; identical to SEQ ID NO: 60923
  misc_feature: 564 for SV(C|O) and mtDNA

SEQ ID NO: 78589 - DNA, 120 bp, Homo sapiens
  misc_feature: 564 for SV(C|O) and mtDNA
gagaatccaaaattctccgtgccacctatcacaccccatcctaaagtaaggtcagctaaataagctatcgggcccataccccgaaaatgttggttatacccttcccgtactaattaatcc

SEQ ID NO: 78590 - DNA, 120 bp, Homo sapiens
  misc_feature: 564 for SV(C|O) and mtDNA
gccctcggcttacttctcttccttctctccttaatgacattaacactattctcaccagacctcctaggcgacccagacaattataccctagccaaccccttaaacacccctccccacatc

SEQ ID NO: 78591 - DNA, 120 bp, Homo sapiens
  misc_feature: 564 for SV(C|O) and mtDNA
gataaagaatattgaggcgccattggcgtgaaggtagcggatgattcagccataatttacgtctcgagtgatgtgggcgattgatgaaaaggcggttgaggcgtctggtgagtagtgcat

SEQ ID NO: 78592 - DNA, 120 bp, Homo sapiens
  misc_feature: 564 for SV(C|O) and mtDNA
attcttgcacgaaacgggatcaaacaaccccctaggaatcacctcccattccgataaaatcaccttccacccttactacacaatcaaagacgccctcggcttacttctcttccttctctc

SEQ ID NO: 78593 - DNA, 120 bp, Homo sapiens
  misc_feature: 564 for SV(C|O) and mtDNA
gaaaaataggaggactactcaaaaccatacctctcacttcaacctccctcaccattggcagcctagcattagcaggaatacctttcctcacaggtttctactccaaagaccacatcatcg

SEQ ID NO: 78594 - DNA, 120 bp, Homo sapiens
  misc_feature: 564 for SV(C|O) and mtDNA
ctgtccaaaaaggccttcgatacgggataatcctatttattacctcagaagtttttttcttcgcaggatttttctgagccttttaccactccagcctagcccctaccccccaattaggag

SEQ ID NO: 78595 - DNA, 120 bp, Homo sapiens; identical to SEQ ID NO: 60905
  misc_feature: 564 for SV(C|O) and mtDNA

SEQ ID NO: 78596 - DNA, 120 bp, Homo sapiens
  misc_feature: 564 for SV(C|O) and mtDNA
ctatagcaacagccttcataggctatgtcctcccgtgaggccaaatatcattctgaggggccacagtaattacaaacttactatccgccatcccatacattgggacagacctagttcaat

SEQ ID NO: 78597 - DNA, 120 bp, Homo sapiens; identical to SEQ ID NO: 60084
  misc_feature: 564 for SV(C|O) and mtDNA

SEQ ID NO: 78598 - DNA, 120 bp, Homo sapiens; identical to SEQ ID NO: 62451
  misc_feature: 564 for SV(C|O) and mtDNA

SEQ ID NO: 78599 - DNA, 120 bp, Homo sapiens; identical to SEQ ID NO: 62677
  misc_feature: 564 for SV(C|O) and mtDNA

SEQ ID NO: 78600 - DNA, 120 bp, Homo sapiens
  misc_feature: 564 for SV(C|O) and mtDNA
caccctccttaacctctacttctacctacgcctaatctactccacctcaatcacactactccccatatctaacaacgtaaaaataaaatgacagtttgaacatacaaaacccaccccatt

SEQ ID NO: 78601 - DNA, 120 bp, Homo sapiens
  misc_feature: 564 for SV(C|O) and mtDNA
aaccacccacagcctaattattagcatcatccctctactattttttaaccaaatcaacaacaacctatttagctgttccccaaccttttcctccgaccccctaacaacccccctcctaat

SEQ ID NO: 78602 - DNA, 120 bp, Homo sapiens; identical to SEQ ID NO: 61487
  misc_feature: 564 for SV(C|O) and mtDNA

SEQ ID NO: 78603 - DNA, 120 bp, Homo sapiens
  misc_feature: 563 for SV(C|O) and mtDNA
tttcgtgccagccaccgcggtcacacgattaacccaagtcaatagaagccggcgtaaagagtgttttagatcaccccctccccaataaagctaaaactcacctgagttgtaaaaaactcc

SEQ ID NO: 78604 - DNA, 120 bp, Homo sapiens
  misc_feature: 563 for SV(C|O) and mtDNA
tcttgcactcatgagctgtccccacattaggcttaaaaacagatgcaattcccggacgtctaaaccaaaccactttcaccgctacacgaccgggggtatactacggtcaatgctctgaaa

SEQ ID NO: 78605 - DNA, 120 bp, Homo sapiens; identical to SEQ ID NO: 58200
  misc_feature: 563 for SV(C|O) and mtDNA

SEQ ID NO: 78606 - DNA, 120 bp, Homo sapiens; identical to SEQ ID NO: 62649
  misc_feature: 563 for SV(C|O) and mtDNA

SEQ ID NO: 78607 - DNA, 120 bp, Homo sapiens
  misc_feature: 563 for SV(C|O) and mtDNA
agggtggaaggtgattttatcggaatgggaggtgattcctagggggttgtttgatcccgtttcgtgcaagaataggaggtggagtgctgctagggctgcaataatgaagggcaagatgaa

SEQ ID NO: 78608 - DNA, 120 bp, Homo sapiens; identical to SEQ ID NO: 59313
  misc_feature: 563 for SV(C|O) and mtDNA

SEQ ID NO: 78609 - DNA, 120 bp, Homo sapiens
  misc_feature: 563 for SV(C|O) and mtDNA
gtgtggcgagtcagctaaatactttgacgccggtggggatagcgatgattatggtagcggaggtgaaatatgctcgtgtgtctacgtctattcctactgtaaatatatggtgtgctcaca

SEQ ID NO: 78610 - DNA, 120 bp, Homo sapiens
  misc_feature: 563 for SV(C|O) and mtDNA
tgccctattactatccatcctcatcctagcaataatccccatcctccatatatccaaacaacaaagcataatatttcgcccactaagccaatcactttattgactcctagccgcagacct

SEQ ID NO: 78611 - DNA, 120 bp, Homo sapiens
  misc_feature: 563 for SV(C|O) and mtDNA
tgcccatcgtcctagaattaattcccctaaaaatctttgaaatagggcccgtatttaccctatagcaccccctctaccccctctagagcccactgtaaagctaacttagcattaaccttt

SEQ ID NO: 78612 - DNA, 120 bp, Homo sapiens
  misc_feature: 563 for SV(C|O) and mtDNA
agataaagaatattgaggcgccattggcgtgaaggtagcggatgattcagccataatttacgtctcgagtgatgtgggcgattgatgaaaaggcggttgaggcgtctggtgagtagtgca

SEQ ID NO: 78613 - DNA, 120 bp, Homo sapiens
  misc_feature: 563 for SV(C|O) and mtDNA
tattactatccatcctcatcctagcaataatccccatcctccatatatccaaacaacaaagcataatatttcgcccactaagccaatcactttattgactcctagccgcagacctcctca

SEQ ID NO: 78614 - DNA, 120 bp, Homo sapiens
  misc_feature: 563 for SV(C|O) and mtDNA
tgaagtttatattcttatcctaccaggcttcggaataatctcccatattgtaacttactactccggaaaaaaagaaccatttggatacataggtatggtctgagctatgatatcaattgg

SEQ ID NO: 78615 - DNA, 120 bp, Homo sapiens
  misc_feature: 563 for SV(C|O) and mtDNA
tactaacatctcagacgctcaggaaatagaaaccgtctgaactatcctgcccgccatcatcctagtcctcatcgccctcccatccctgcgcatcctttacataacagacgaggtcaacga

SEQ ID NO: 78616 - DNA, 120 bp, Homo sapiens
  misc_feature: 563 for SV(C|O) and mtDNA
cacatgaatattgttgtggggaagagactgataataaaggtggatgcgacaatggattttacataatgggggtatgagttttttttgttagggttaacgagggtggtaaggatgggggga

SEQ ID NO: 78617 - DNA, 120 bp, Homo sapiens
  misc_feature: 563 for SV(C|O) and mtDNA
tccactcaagcactatagttgtagcaggaatcttcttactcatccgcttccaccccctagcagaaaatagcccactaatccaaactctaacactatgcttaggcgctatcaccactctgt

SEQ ID NO: 78618 - DNA, 120 bp, Homo sapiens
  misc_feature: 563 for SV(C|O) and mtDNA
aatagttacaatcggcatcaaccaaccacacctagcattcctgcacatctgtacccacgccttcttcaaagccatactatttatgtgctccgggtccatcatccacaaccttaacaatga

SEQ ID NO: 78619 - DNA, 120 bp, Homo sapiens
  misc_feature: 563 for SV(C|O) and mtDNA
tcagtgcgagcttagcgctgtgatgagtgtgcctgcaaagatggtagagtagatgacgggttgggccaggggattaattagtacgggaagggtataaccaacattttcggggtatgggcc

SEQ ID NO: 78620 - DNA, 120 bp, Homo sapiens
  misc_feature: 563 for SV(C|O) and mtDNA
gggtataattgtctgggtcgcctaggaggtctggtgagaatagtgttaatgtcattaaggagagaaggaagagaagtaagccgagggcgtctttgattgtgtagtaagggtggaaggtga

SEQ ID NO: 78621 - DNA, 120 bp, Homo sapiens
  misc_feature: 563 for SV(C|O) and mtDNA
taatcattttccttatctgcttcctagtcctgtatgcccttttcctaacactcacaacaaaactaactaatactaacatctcagacgctcaggaaatagaaaccgtctgaactatcctgc

SEQ ID NO: 78622 - DNA, 120 bp, Homo sapiens
  misc_feature: 563 for SV(C|O) and mtDNA
aaaactcaaaggacctggcggtgcttcatatccctctagaggagcctgttctgtaatcgataaaccccgatcaacctcaccacctcttgctcagcctatataccgccatcttcagcaaac

SEQ ID NO: 78623 - DNA, 120 bp, Homo sapiens; identical to SEQ ID NO: 62252
  misc_feature: 563 for SV(C|O) and mtDNA

SEQ ID NO: 78624 - DNA, 120 bp, Homo sapiens
  misc_feature: 563 for SV(C|O) and mtDNA
ggcgagtcagctaaatactttgacgccggtggggatagcgatgattatggtagcggaggtgaaatatgctcgtgtgtctacgtctattcctactgtaaatatatggtgtgctcacacgat

SEQ ID NO: 78625 - DNA, 120 bp, Homo sapiens
  misc_feature: 563 for SV(C|O) and mtDNA
caaccagtaagctacccttttaccatcattggacaagtagcatccgtactatacttcacaacaatcctaatcctaataccaactatctccctaattgaaaacaaaatactcaaatgggcc

SEQ ID NO: 78626 - DNA, 120 bp, Homo sapiens
  misc_feature: 563 for SV(C|O) and mtDNA
gcctaatctactccacctcaatcacactactccccatatctaacaacgtaaaaataaaatgacagtttgaacatacaaaacccaccccattcctccccacactcatcgcccttaccacgc

SEQ ID NO: 78627 - DNA, 120 bp, Homo sapiens
  misc_feature: 563 for SV(C|O) and mtDNA
gccctattactatccatcctcatcctagcaataatccccatcctccatatatccaaacaacaaagcataatatttcgcccactaagccaatcactttattgactcctagccgcagacctc

SEQ ID NO: 78628 - DNA, 120 bp, Homo sapiens
  misc_feature: 563 for SV(C|O) and mtDNA
atttcgtgccagccaccgcggtcacacgattaacccaagtcaatagaagccggcgtaaagagtgttttagatcaccccctccccaataaagctaaaactcacctgagttgtaaaaaactc

SEQ ID NO: 78629 - DNA, 120 bp, Homo sapiens
  misc_feature: 563 for SV(C|O) and mtDNA
gactagtatggcaataggcacaatattggctaagagggagtgggtgttgagggttatgagagtagctataatgaacagtgatagtattattccttctaggcatagtagggaggatatgag

SEQ ID NO: 78630 - DNA, 120 bp, Homo sapiens; identical to SEQ ID NO: 59097
  misc_feature: 563 for SV(C|O) and mtDNA

SEQ ID NO: 78631 - DNA, 120 bp, Homo sapiens; identical to SEQ ID NO: 62545
  misc_feature: 563 for SV(C|O) and mtDNA

SEQ ID NO: 78632 - DNA, 120 bp, Homo sapiens
  misc_feature: 563 for SV(C|O) and mtDNA
ctcaacatactagtcacagccctatactccctctacatatttaccacaacacaatggggctcactcacccaccacattaacaacataaaaccctcattcacacgagaaaacaccctcatg

SEQ ID NO: 78633 - DNA, 120 bp, Homo sapiens
  misc_feature: 563 for SV(C|O) and mtDNA
agcttgtttcaggtgcgagatagtagtagggtcgtggtgctggagtttaagttgagtagtaggaatgcggtagtagttaggataatataaatagttaaattaagaatggttatgttaggg

SEQ ID NO: 78634 - DNA, 120 bp, Homo sapiens
  misc_feature: 563 for SV(C|O) and mtDNA
aagactagtatggcaataggcacaatattggctaagagggagtgggtgttgagggttatgagagtagctataatgaacagtgatagtattattccttctaggcatagtagggaggatatg

SEQ ID NO: 78635 - DNA, 120 bp, Homo sapiens
  misc_feature: 563 for SV(C|O) and mtDNA
catatcatacacaaacgcctgagccctatctattactctcatcgctacctccctgacaagcgcctatagcactcgaataattcttctcaccctaacaggtcaacctcgcttccccaccct

SEQ ID NO: 78636 - DNA, 120 bp, Homo sapiens
  misc_feature: 563 for SV(C|O) and mtDNA
actaacatctcagacgctcaggaaatagaaaccgtctgaactatcctgcccgccatcatcctagtcctcatcgccctcccatccctgcgcatcctttacataacagacgaggtcaacgat

SEQ ID NO: 78637 - DNA, 120 bp, Homo sapiens
  misc_feature: 563 for SV(C|O) and mtDNA
aagaccctatggagctttaatttattaatgcaaacagtacctaacaaacccacaggtcctaaactaccaaacctgcattaaaaatttcggttggggcgacctcggagcagaacccaacct

SEQ ID NO: 78638 - DNA, 120 bp, Homo sapiens
  misc_feature: 562 for SV(C|O) and mtDNA
ttaaaactcaaaggacctggcggtgcttcatatccctctagaggagcctgttctgtaatcgataaaccccgatcaacctcaccacctcttgctcagcctatataccgccatcttcagcaa

SEQ ID NO: 78639 - DNA, 120 bp, Homo sapiens; identical to SEQ ID NO: 63038
  misc_feature: 562 for SV(C|O) and mtDNA

SEQ ID NO: 78640 - DNA, 120 bp, Homo sapiens; identical to SEQ ID NO: 61862
  misc_feature: 562 for SV(C|O) and mtDNA

SEQ ID NO: 78641 - DNA, 120 bp, Homo sapiens
  misc_feature: 562 for SV(C|O) and mtDNA
ttagcttgtttcaggtgcgagatagtagtagggtcgtggtgctggagtttaagttgagtagtaggaatgcggtagtagttaggataatataaatagttaaattaagaatggttatgttag

SEQ ID NO: 78642 - DNA, 120 bp, Homo sapiens
  misc_feature: 562 for SV(C|O) and mtDNA
atgctaggtgtggttggttgatgccgattgtaactattatgagtcctagttgacttgaagtggagaaggctacgatttttttgatgtcattttgtgtaagggcgcagactgctgcgaaca

SEQ ID NO: 78643 - DNA, 120 bp, Homo sapiens
  misc_feature: 562 for SV(C|O) and mtDNA
tcatcctagtcctcatcgccctcccatccctgcgcatcctttacataacagacgaggtcaacgatccctcccttaccatcaaatcaattggccaccaatggtactgaacctacgagtaca

SEQ ID NO: 78644 - DNA, 120 bp, Homo sapiens; identical to SEQ ID NO: 62832
  misc_feature: 562 for SV(C|O) and mtDNA

SEQ ID NO: 78645 - DNA, 120 bp, Homo sapiens; identical to SEQ ID NO: 53829
  misc_feature: 562 for SV(C|O) and mtDNA

SEQ ID NO: 78646 - DNA, 120 bp, Homo sapiens
  misc_feature: 562 for SV(C|O) and mtDNA
cctgtccaaaaaggccttcgatacgggataatcctatttattacctcagaagtttttttcttcgcaggatttttctgagccttttaccactccagcctagcccctaccccccaattagga

SEQ ID NO: 78647 - DNA, 120 bp, Homo sapiens
  misc_feature: 562 for SV(C|O) and mtDNA
tcatgatcacgccctcataatcattttccttatctgcttcctagtcctgtatgcccttttcctaacactcacaacaaaactaactaatactaacatctcagacgctcaggaaatagaaac

SEQ ID NO: 78648 - DNA, 120 bp, Homo sapiens
  misc_feature: 562 for SV(C|O) and mtDNA
gttggggcatttcactgtaaagaggtgttggttctcttaatctttaacttaaaaggttaatgctaagttagctttacagtgggctctagagggggtagagggggtgctatagggtaaata

SEQ ID NO: 78649 - DNA, 120 bp, Homo sapiens
  misc_feature: 562 for SV(C|O) and mtDNA
tacgatgtctagtgatgagtttgctaatacaatgccagtcaggccgcctacggtgaaaagaaagatgaatcctagggctcagagcactgcagcagatcatttcatattgcttccgtggag

SEQ ID NO: 78650 - DNA, 120 bp, Homo sapiens
  misc_feature: 562 for SV(C|O) and mtDNA
gacccccctcagataggggtcccttgaccaccatcctccgtgaaatcaatatcccgcacaagagtgctactctcctcgctccgggcccataacacttgggggtagctaaagtgaactgta

SEQ ID NO: 78651 - DNA, 120 bp, Homo sapiens
  misc_feature: 562 for SV(C|O) and mtDNA
caatcaaagacgccctcggcttacttctcttccttctctccttaatgacattaacactattctcaccagacctcctaggcgacccagacaattataccctagccaaccccttaaacaccc

SEQ ID NO: 78652 - DNA, 120 bp, Homo sapiens
  misc_feature: 562 for SV(C|O) and mtDNA
accacacaccacctgtccaaaaaggccttcgatacgggataatcctatttattacctcagaagtttttttcttcgcaggatttttctgagccttttaccactccagcctagcccctaccc

SEQ ID NO: 78653 - DNA, 120 bp, Homo sapiens
  misc_feature: 562 for SV(C|O) and mtDNA
gggctattttctgctagggggtggaagcggatgagtaagaagattcctgctacaactatagtgcttgagtggagtagggctgagactggggtggggccttctatggctgaggggagtcag

SEQ ID NO: 78654 - DNA, 120 bp, Homo sapiens
  misc_feature: 562 for SV(C|O) and mtDNA
gcccatcgtcctagaattaattcccctaaaaatctttgaaatagggcccgtatttaccctatagcaccccctctaccccctctagagcccactgtaaagctaacttagcattaacctttt

SEQ ID NO: 78655 - DNA, 120 bp, Homo sapiens; identical to SEQ ID NO: 57385
  misc_feature: 562 for SV(C|O) and mtDNA

SEQ ID NO: 78656 - DNA, 120 bp, Homo sapiens
  misc_feature: 562 for SV(C|O) and mtDNA
cgaaaaataggaggactactcaaaaccatacctctcacttcaacctccctcaccattggcagcctagcattagcaggaatacctttcctcacaggtttctactccaaagaccacatcatc

SEQ ID NO: 78657 - DNA, 120 bp, Homo sapiens
  misc_feature: 562 for SV(C|O) and mtDNA
gaggggggttgttagggggtcggaggaaaaggttggggaacagctaaataggttgttgttgatttggttaaaaaatagtagagggatgatgctaataattaggctgtgggtggttgtgtt

SEQ ID NO: 78658 - DNA, 120 bp, Homo sapiens
  misc_feature: 562 for SV(C|O) and mtDNA
ctgtatgcccttttcctaacactcacaacaaaactaactaatactaacatctcagacgctcaggaaatagaaaccgtctgaactatcctgcccgccatcatcctagtcctcatcgccctc

SEQ ID NO: 78659 - DNA, 120 bp, Homo sapiens
  misc_feature: 562 for SV(C|O) and mtDNA
catctcagacgctcaggaaatagaaaccgtctgaactatcctgcccgccatcatcctagtcctcatcgccctcccatccctgcgcatcctttacataacagacgaggtcaacgatccctc

SEQ ID NO: 78660 - DNA, 120 bp, Homo sapiens
  misc_feature: 562 for SV(C|O) and mtDNA
gacaaccagtaagctacccttttaccatcattggacaagtagcatccgtactatacttcacaacaatcctaatcctaataccaactatctccctaattgaaaacaaaatactcaaatggg

SEQ ID NO: 78661 - DNA, 120 bp, Homo sapiens
  misc_feature: 562 for SV(C|O) and mtDNA
cttgcactcatgagctgtccccacattaggcttaaaaacagatgcaattcccggacgtctaaaccaaaccactttcaccgctacacgaccgggggtatactacggtcaatgctctgaaat

SEQ ID NO: 78662 - DNA, 120 bp, Homo sapiens
  misc_feature: 562 for SV(C|O) and mtDNA
cctattactatccatcctcatcctagcaataatccccatcctccatatatccaaacaacaaagcataatatttcgcccactaagccaatcactttattgactcctagccgcagacctcct

SEQ ID NO: 78663 - DNA, 120 bp, Homo sapiens
  misc_feature: 562 for SV(C|O) and mtDNA
atgtagagggagtatagggctgtgactagtatgttgagtcctgtaagtaggagagtgatatttgatcaggagaacgtggttactagcacagagagttctcccagtaggttaatagtgggg

SEQ ID NO: 78664 - DNA, 120 bp, Homo sapiens; identical to SEQ ID NO: 63245
  misc_feature: 562 for SV(C|O) and mtDNA

SEQ ID NO: 78665 - DNA, 120 bp, Homo sapiens
  misc_feature: 562 for SV(C|O) and mtDNA
cacagtaattacaaacttactatccgccatcccatacattgggacagacctagttcaatgaatctgaggaggctactcagtagacagtcccaccctcacacgattctttacctttcactt

SEQ ID NO: 78666 - DNA, 120 bp, Homo sapiens
  misc_feature: 562 for SV(C|O) and mtDNA
atgcccttttcctaacactcacaacaaaactaactaatactaacatctcagacgctcaggaaatagaaaccgtctgaactatcctgcccgccatcatcctagtcctcatcgccctcccat

SEQ ID NO: 78667 - DNA, 120 bp, Homo sapiens
  misc_feature: 562 for SV(C|O) and mtDNA
acccccctcagataggggtcccttgaccaccatcctccgtgaaatcaatatcccgcacaagagtgctactctcctcgctccgggcccataacacttgggggtagctaaagtgaactgtat

SEQ ID NO: 78668 - DNA, 120 bp, Homo sapiens
  misc_feature: 561 for SV(C|O) and mtDNA
tttacgtctcgagtgatgtgggcgattgatgaaaaggcggttgaggcgtctggtgagtagtgcatggctaggaatagtcctgtggtgatttggaggatcaggcaggcgccaaggagtgag

SEQ ID NO: 78669 - DNA, 120 bp, Homo sapiens
  misc_feature: 561 for SV(C|O) and mtDNA
atagttacaatcggcatcaaccaaccacacctagcattcctgcacatctgtacccacgccttcttcaaagccatactatttatgtgctccgggtccatcatccacaaccttaacaatgaa

SEQ ID NO: 78670 - DNA, 120 bp, Homo sapiens
  misc_feature: 561 for SV(C|O) and mtDNA
acgccctcggcttacttctcttccttctctccttaatgacattaacactattctcaccagacctcctaggcgacccagacaattataccctagccaaccccttaaacacccctccccaca

SEQ ID NO: 78671 - DNA, 120 bp, Homo sapiens; identical to SEQ ID NO: 61730
  misc_feature: 561 for SV(C|O) and mtDNA

SEQ ID NO: 78672 - DNA, 120 bp, Homo sapiens
  misc_feature: 561 for SV(C|O) and mtDNA
tgtcgtgtagtacgatgtctagtgatgagtttgctaatacaatgccagtcaggccgcctacggtgaaaagaaagatgaatcctagggctcagagcactgcagcagatcatttcatattgc

SEQ ID NO: 78673 - DNA, 120 bp, Homo sapiens
  misc_feature: 561 for SV(C|O) and mtDNA
tgtagagggagtatagggctgtgactagtatgttgagtcctgtaagtaggagagtgatatttgatcaggagaacgtggttactagcacagagagttctcccagtaggttaatagtggggg

SEQ ID NO: 78674 - DNA, 120 bp, Homo sapiens
  misc_feature: 561 for SV(C|O) and mtDNA
tactaataagtggctcctttaacctctccacccttatcacaacacaagaacacctctgattactcctgccatcatgacccttggccataatatgatttatctccacactagcagagacca

SEQ ID NO: 78675 - DNA, 120 bp, Homo sapiens; identical to SEQ ID NO: 62702
  misc_feature: 561 for SV(C|O) and mtDNA

SEQ ID NO: 78676 - DNA, 120 bp, Homo sapiens
  misc_feature: 561 for SV(C|O) and mtDNA
tgctaggtgtggttggttgatgccgattgtaactattatgagtcctagttgacttgaagtggagaaggctacgatttttttgatgtcattttgtgtaagggcgcagactgctgcgaacag

SEQ ID NO: 78677 - DNA, 120 bp, Homo sapiens
  misc_feature: 561 for SV(C|O) and mtDNA
tcttggtctaggcacatgaatattgttgtggggaagagactgataataaaggtggatgcgacaatggattttacataatgggggtatgagttttttttgttagggttaacgagggtggta

SEQ ID NO: 78678 - DNA, 120 bp, Homo sapiens
  misc_feature: 561 for SV(C|O) and mtDNA
tcgtgtagtacgatgtctagtgatgagtttgctaatacaatgccagtcaggccgcctacggtgaaaagaaagatgaatcctagggctcagagcactgcagcagatcatttcatattgctt

SEQ ID NO: 78679 - DNA, 120 bp, Homo sapiens; identical to SEQ ID NO: 59580
  misc_feature: 561 for SV(C|O) and mtDNA

SEQ ID NO: 78680 - DNA, 120 bp, Homo sapiens
  misc_feature: 561 for SV(C|O) and mtDNA
tcagccataatttacgtctcgagtgatgtgggcgattgatgaaaaggcggttgaggcgtctggtgagtagtgcatggctaggaatagtcctgtggtgatttggaggatcaggcaggcgcc

SEQ ID NO: 78681 - DNA, 120 bp, Homo sapiens
  misc_feature: 561 for SV(C|O) and mtDNA
tcacgccctcataatcattttccttatctgcttcctagtcctgtatgcccttttcctaacactcacaacaaaactaactaatactaacatctcagacgctcaggaaatagaaaccgtctg

SEQ ID NO: 78682 - DNA, 120 bp, Homo sapiens
  misc_feature: 561 for SV(C|O) and mtDNA
cgaccctatatcccccgcccgcgtccctttctccataaaattcttcttagtagctattaccttcttattatttgatctagaaattgccctccttttacccctaccatgagccctacaaac

SEQ ID NO: 78683 - DNA, 120 bp, Homo sapiens
  misc_feature: 561 for SV(C|O) and mtDNA
gtcggtttctatctacttcaaattcctccctgtacgaaaggacaagagaaataaggcctacttcacaaagcgccttcccccgtaaatgatatcatctcaacttagtattatacccacacc

SEQ ID NO: 78684 - DNA, 120 bp, Homo sapiens
  misc_feature: 561 for SV(C|O) and mtDNA
gtccttgagagaggattatgatgcgactgtgagtgcgttcgtagtttgagtttgctaggcagaatagtaatgaggatgtaagtccgtgggcgattatgagaatgactgcgccggtgaagc

SEQ ID NO: 78685 - DNA, 120 bp, Homo sapiens
  misc_feature: 561 for SV(C|O) and mtDNA
aaaaccatacctctcacttcaacctccctcaccattggcagcctagcattagcaggaatacctttcctcacaggtttctactccaaagaccacatcatcgaaaccgcaaacatatcatac

SEQ ID NO: 78686 - DNA, 120 bp, Homo sapiens; identical to SEQ ID NO: 57937
  misc_feature: 561 for SV(C|O) and mtDNA

SEQ ID NO: 78687 - DNA, 120 bp, Homo sapiens; identical to SEQ ID NO: 57179
  misc_feature: 561 for SV(C|O) and mtDNA

SEQ ID NO: 78688 - DNA, 120 bp, Homo sapiens
  misc_feature: 561 for SV(C|O) and mtDNA
agtcaactaggactcataatagttacaatcggcatcaaccaaccacacctagcattcctgcacatctgtacccacgccttcttcaaagccatactatttatgtgctccgggtccatcatc

SEQ ID NO: 78689 - DNA, 120 bp, Homo sapiens
  misc_feature: 561 for SV(C|O) and mtDNA
atcggcatcaaccaaccacacctagcattcctgcacatctgtacccacgccttcttcaaagccatactatttatgtgctccgggtccatcatccacaaccttaacaatgaacaagatatc

SEQ ID NO: 78690 - DNA, 120 bp, Homo sapiens
  misc_feature: 561 for SV(C|O) and mtDNA
cccatcaacaaccgctatgtaattcgtacattactgccagccaccatgaatattgtacggtaccataaatacttgaccacctgtagtacataaaaacccaatccacatcaaaaccccctc

SEQ ID NO: 78691 - DNA, 120 bp, Homo sapiens; identical to SEQ ID NO: 63243
  misc_feature: 561 for SV(C|O) and mtDNA

SEQ ID NO: 78692 - DNA, 120 bp, Homo sapiens
  misc_feature: 561 for SV(C|O) and mtDNA
aatgcatggagagctcccgtgagtggttaatagggtgatagacctgtgatccatcgtgatgtcttatttaaggggaacgtgtgggctatttaggctttatggccctgaagtaggaaccag

SEQ ID NO: 78693 - DNA, 120 bp, Homo sapiens
  misc_feature: 561 for SV(C|O) and mtDNA
cgccctcggcttacttctcttccttctctccttaatgacattaacactattctcaccagacctcctaggcgacccagacaattataccctagccaaccccttaaacacccctccccacat

SEQ ID NO: 78694 - DNA, 120 bp, Homo sapiens; identical to SEQ ID NO: 57985
  misc_feature: 561 for SV(C|O) and mtDNA

SEQ ID NO: 78695 - DNA, 120 bp, Homo sapiens
  misc_feature: 561 for SV(C|O) and mtDNA
catgcccatcgtcctagaattaattcccctaaaaatctttgaaatagggcccgtatttaccctatagcaccccctctaccccctctagagcccactgtaaagctaacttagcattaacct

SEQ ID NO: 78696 - DNA, 120 bp, Homo sapiens
  misc_feature: 561 for SV(C|O) and mtDNA
caccacctgtccaaaaaggccttcgatacgggataatcctatttattacctcagaagtttttttcttcgcaggatttttctgagccttttaccactccagcctagcccctaccccccaat

SEQ ID NO: 78697 - DNA, 120 bp, Homo sapiens
  misc_feature: 560 for SV(C|O) and mtDNA
ttgactcacccatcaacaaccgctatgtaattcgtacattactgccagccaccatgaatattgtacggtaccataaatacttgaccacctgtagtacataaaaacccaatccacatcaaa

SEQ ID NO: 78698 - DNA, 120 bp, Homo sapiens
  misc_feature: 560 for SV(C|O) and mtDNA
gggtcttagctattgtgtgttcagatatgttaaagccactttcgtagtctattttgtgtcagctggagttttttacaactcaggtgagttttagctttattggggagggggtgatctaaa

SEQ ID NO: 78699 - DNA, 120 bp, Homo sapiens; identical to SEQ ID NO: 58443
  misc_feature: 560 for SV(C|O) and mtDNA

SEQ ID NO: 78700 - DNA, 120 bp, Homo sapiens; identical to SEQ ID NO: 62584
  misc_feature: 560 for SV(C|O) and mtDNA

SEQ ID NO: 78701 - DNA, 120 bp, Homo sapiens
  misc_feature: 560 for SV(C|O) and mtDNA
tgtggcgagtcagctaaatactttgacgccggtggggatagcgatgattatggtagcggaggtgaaatatgctcgtgtgtctacgtctattcctactgtaaatatatggtgtgctcacac

SEQ ID NO: 78702 - DNA, 120 bp, Homo sapiens
  misc_feature: 560 for SV(C|O) and mtDNA
aaatgcatggagagctcccgtgagtggttaatagggtgatagacctgtgatccatcgtgatgtcttatttaaggggaacgtgtgggctatttaggctttatggccctgaagtaggaacca

SEQ ID NO: 78703 - DNA, 120 bp, Homo sapiens
  misc_feature: 560 for SV(C|O) and mtDNA
tggtctttggagtagaaacctgtgaggaaaggtattcctgctaatgctaggctgccaatggtgagggaggttgaagtgagaggtatggttttgagtagtcctcctatttttcggatatct

SEQ ID NO: 78704 - DNA, 120 bp, Homo sapiens
  misc_feature: 560 for SV(C|O) and mtDNA
agacgccctcggcttacttctcttccttctctccttaatgacattaacactattctcaccagacctcctaggcgacccagacaattataccctagccaaccccttaaacacccctcccca

SEQ ID NO: 78705 - DNA, 120 bp, Homo sapiens
  misc_feature: 560 for SV(C|O) and mtDNA
acatactagtcacagccctatactccctctacatatttaccacaacacaatggggctcactcacccaccacattaacaacataaaaccctcattcacacgagaaaacaccctcatgttca

SEQ ID NO: 78706 - DNA, 120 bp, Homo sapiens; identical to SEQ ID NO: 62978
  misc_feature: 560 for SV(C|O) and mtDNA

SEQ ID NO: 78707 - DNA, 120 bp, Homo sapiens
  misc_feature: 560 for SV(C|O) and mtDNA
ggcatcaaccaaccacacctagcattcctgcacatctgtacccacgccttcttcaaagccatactatttatgtgctccgggtccatcatccacaaccttaacaatgaacaagatatccga

SEQ ID NO: 78708 - DNA, 120 bp, Homo sapiens; identical to SEQ ID NO: 60059
  misc_feature: 560 for SV(C|O) and mtDNA

SEQ ID NO: 78709 - DNA, 120 bp, Homo sapiens
  misc_feature: 560 for SV(C|O) and mtDNA
agactagtatggcaataggcacaatattggctaagagggagtgggtgttgagggttatgagagtagctataatgaacagtgatagtattattccttctaggcatagtagggaggatatga

SEQ ID NO: 78710 - DNA, 120 bp, Homo sapiens
  misc_feature: 560 for SV(C|O) and mtDNA
atgtggtctttggagtagaaacctgtgaggaaaggtattcctgctaatgctaggctgccaatggtgagggaggttgaagtgagaggtatggttttgagtagtcctcctatttttcggata

SEQ ID NO: 78711 - DNA, 120 bp, Homo sapiens
  misc_feature: 560 for SV(C|O) and mtDNA
cctccctctctcctactcctgctcgcatctgctatagtggaggccggagcaggaacaggttgaacagtctaccctcccttagcagggaactactcccaccctggagcctccgtagaccta

SEQ ID NO: 78712 - DNA, 120 bp, Homo sapiens
  misc_feature: 560 for SV(C|O) and mtDNA
aatactaacatctcagacgctcaggaaatagaaaccgtctgaactatcctgcccgccatcatcctagtcctcatcgccctcccatccctgcgcatcctttacataacagacgaggtcaac

SEQ ID NO: 78713 - DNA, 120 bp, Homo sapiens
  misc_feature: 560 for SV(C|O) and mtDNA
gtgttacatcgcgccatcattggtatatggttagtgtgttggttagtaggcctagtatgaggagcgttatggagtggaagtgaaatcacatggctaggccggaggtcattaggagggctg

SEQ ID NO: 78714 - DNA, 120 bp, Homo sapiens
  misc_feature: 560 for SV(C|O) and mtDNA
aaactaactaatactaacatctcagacgctcaggaaatagaaaccgtctgaactatcctgcccgccatcatcctagtcctcatcgccctcccatccctgcgcatcctttacataacagac

SEQ ID NO: 78715 - DNA, 120 bp, Homo sapiens
  misc_feature: 560 for SV(C|O) and mtDNA
ggtctttggagtagaaacctgtgaggaaaggtattcctgctaatgctaggctgccaatggtgagggaggttgaagtgagaggtatggttttgagtagtcctcctatttttcggatatctt

SEQ ID NO: 78716 - DNA, 120 bp, Homo sapiens; identical to SEQ ID NO: 58862
  misc_feature: 560 for SV(C|O) and mtDNA

SEQ ID NO: 78717 - DNA, 120 bp, Homo sapiens
  misc_feature: 560 for SV(C|O) and mtDNA
actcaaactacgaacgcactcacagtcgcatcataatcctctctcaaggacttcaaactctactcccactaatagctttttgatgacttctagcaagcctcgctaacctcgccttacccc

SEQ ID NO: 78718 - DNA, 120 bp, Homo sapiens
  misc_feature: 560 for SV(C|O) and mtDNA
atcaacaaccgctatgtaattcgtacattactgccagccaccatgaatattgtacggtaccataaatacttgaccacctgtagtacataaaaacccaatccacatcaaaaccccctcccc

SEQ ID NO: 78719 - DNA, 120 bp, Homo sapiens
  misc_feature: 560 for SV(C|O) and mtDNA
gcacccaaatctgcttccccatgaaagaacagagaatagtttaaattagaatcttagctttgggtgctaatggtggagttaaagactttttctctgatttgtccttggaaaaaggttttc

SEQ ID NO: 78720 - DNA, 120 bp, Homo sapiens; identical to SEQ ID NO: 62175
  misc_feature: 560 for SV(C|O) and mtDNA

SEQ ID NO: 78721 - DNA, 120 bp, Homo sapiens
  misc_feature: 560 for SV(C|O) and mtDNA
ctcatgagctgtccccacattaggcttaaaaacagatgcaattcccggacgtctaaaccaaaccactttcaccgctacacgaccgggggtatactacggtcaatgctctgaaatctgtgg

SEQ ID NO: 78722 - DNA, 120 bp, Homo sapiens
  misc_feature: 560 for SV(C|O) and mtDNA
actgtttgcattaataaattaaagctccatagggtcttctcgtcttgctgtgtcatgcccgcctcttcacgggcaggtcaatttcactggttaaaagtaagagacagctgaaccctcgtg

SEQ ID NO: 78723 - DNA, 120 bp, Homo sapiens
  misc_feature: 560 for SV(C|O) and mtDNA
aggttttggctcgtaagaaggcctagataggggattgtgcggtgtgtgatggtagggtagaatccgagtatgttggagaaataaaatgtgcatagtggggattttattttaagtttgttg

SEQ ID NO: 78724 - DNA, 120 bp, Homo sapiens
  misc_feature: 560 for SV(C|O) and mtDNA
atatcatacacaaacgcctgagccctatctattactctcatcgctacctccctgacaagcgcctatagcactcgaataattcttctcaccctaacaggtcaacctcgcttccccaccctt

SEQ ID NO: 78725 - DNA, 120 bp, Homo sapiens
  misc_feature: 560 for SV(C|O) and mtDNA
agttggtcgtagcggaatcgggggtatgctgttcgaattcataagaacagggaggttagaagtagggtcttggtgacaaaatatgttgtgtagagttcaggggagagtgcgtcatatgtt

SEQ ID NO: 78726 - DNA, 120 bp, Homo sapiens
  misc_feature: 560 for SV(C|O) and mtDNA
aacactcacaacaaaactaactaatactaacatctcagacgctcaggaaatagaaaccgtctgaactatcctgcccgccatcatcctagtcctcatcgccctcccatccctgcgcatcct

SEQ ID NO: 78727 - DNA, 120 bp, Homo sapiens; identical to SEQ ID NO: 63015
  misc_feature: 559 for SV(C|O) and mtDNA

SEQ ID NO: 78728 - DNA, 120 bp, Homo sapiens
  misc_feature: 559 for SV(C|O) and mtDNA
tttgaagtccttgagagaggattatgatgcgactgtgagtgcgttcgtagtttgagtttgctaggcagaatagtaatgaggatgtaagtccgtgggcgattatgagaatgactgcgccgg

SEQ ID NO: 78729 - DNA, 120 bp, Homo sapiens; identical to SEQ ID NO: 63013
  misc_feature: 559 for SV(C|O) and mtDNA

SEQ ID NO: 78730 - DNA, 120 bp, Homo sapiens; identical to SEQ ID NO: 54594
  misc_feature: 559 for SV(C|O) and mtDNA

SEQ ID NO: 78731 - DNA, 120 bp, Homo sapiens
  misc_feature: 559 for SV(C|O) and mtDNA
ttcatgcccatcgtcctagaattaattcccctaaaaatctttgaaatagggcccgtatttaccctatagcaccccctctaccccctctagagcccactgtaaagctaacttagcattaac

SEQ ID NO: 78732 - DNA, 120 bp, Homo sapiens
  misc_feature: 559 for SV(C|O) and mtDNA
atacacaaacgcctgagccctatctattactctcatcgctacctccctgacaagcgcctatagcactcgaataattcttctcaccctaacaggtcaacctcgcttccccacccttactaa

SEQ ID NO: 78733 - DNA, 120 bp, Homo sapiens; identical to SEQ ID NO: 58259
  misc_feature: 559 for SV(C|O) and mtDNA

SEQ ID NO: 78734 - DNA, 120 bp, Homo sapiens
  misc_feature: 559 for SV(C|O) and mtDNA
aaaccatacctctcacttcaacctccctcaccattggcagcctagcattagcaggaatacctttcctcacaggtttctactccaaagaccacatcatcgaaaccgcaaacatatcataca

SEQ ID NO: 78735 - DNA, 120 bp, Homo sapiens; identical to SEQ ID NO: 62709
  misc_feature: 559 for SV(C|O) and mtDNA

SEQ ID NO: 78736 - DNA, 120 bp, Homo sapiens
  misc_feature: 559 for SV(C|O) and mtDNA
tgcaagaataggaggtggagtgctgctagggctgcaataatgaagggcaagatgaagtgaaaggtaaagaatcgtgtgagggtgggactgtctactgagtagcctcctcagattcattga

SEQ ID NO: 78737 - DNA, 120 bp, Homo sapiens
  misc_feature: 559 for SV(C|O) and mtDNA
tgatggacccggagcacataaatagtatggctttgaagaaggcgtgggtacagatgtgcaggaatgctaggtgtggttggttgatgccgattgtaactattatgagtcctagttgacttg

SEQ ID NO: 78738 - DNA, 120 bp, Homo sapiens
  misc_feature: 559 for SV(C|O) and mtDNA
aactatagcaacagccttcataggctatgtcctcccgtgaggccaaatatcattctgaggggccacagtaattacaaacttactatccgccatcccatacattgggacagacctagttca

SEQ ID NO: 78739 - DNA, 120 bp, Homo sapiens; identical to SEQ ID NO: 61025
  misc_feature: 559 for SV(C|O) and mtDNA

SEQ ID NO: 78740 - DNA, 120 bp, Homo sapiens
  misc_feature: 559 for SV(C|O) and mtDNA
cataatttacgtctcgagtgatgtgggcgattgatgaaaaggcggttgaggcgtctggtgagtagtgcatggctaggaatagtcctgtggtgatttggaggatcaggcaggcgccaagga

SEQ ID NO: 78741 - DNA, 120 bp, Homo sapiens; identical to SEQ ID NO: 59949
  misc_feature: 559 for SV(C|O) and mtDNA

SEQ ID NO: 78742 - DNA, 120 bp, Homo sapiens
  misc_feature: 559 for SV(C|O) and mtDNA
gcgagtcagctaaatactttgacgccggtggggatagcgatgattatggtagcggaggtgaaatatgctcgtgtgtctacgtctattcctactgtaaatatatggtgtgctcacacgata

SEQ ID NO: 78743 - DNA, 120 bp, Homo sapiens
  misc_feature: 559 for SV(C|O) and mtDNA
tagagggagtatagggctgtgactagtatgttgagtcctgtaagtaggagagtgatatttgatcaggagaacgtggttactagcacagagagttctcccagtaggttaatagtggggggt

SEQ ID NO: 78744 - DNA, 120 bp, Homo sapiens
  misc_feature: 559 for SV(C|O) and mtDNA
tactccactcaagcactatagttgtagcaggaatcttcttactcatccgcttccaccccctagcagaaaatagcccactaatccaaactctaacactatgcttaggcgctatcaccactc

SEQ ID NO: 78745 - DNA, 120 bp, Homo sapiens
  misc_feature: 559 for SV(C|O) and mtDNA
taatttacgtctcgagtgatgtgggcgattgatgaaaaggcggttgaggcgtctggtgagtagtgcatggctaggaatagtcctgtggtgatttggaggatcaggcaggcgccaaggagt

SEQ ID NO: 78746 - DNA, 120 bp, Homo sapiens
  misc_feature: 559 for SV(C|O) and mtDNA
gtgtggtggccttggtatgtgctttctcgtgttacatcgcgccatcattggtatatggttagtgtgttggttagtaggcctagtatgaggagcgttatggagtggaagtgaaatcacatg

SEQ ID NO: 78747 - DNA, 120 bp, Homo sapiens
  misc_feature: 559 for SV(C|O) and mtDNA
ctgcttgcaactatagcaacagccttcataggctatgtcctcccgtgaggccaaatatcattctgaggggccacagtaattacaaacttactatccgccatcccatacattgggacagac

SEQ ID NO: 78748 - DNA, 120 bp, Homo sapiens
  misc_feature: 559 for SV(C|O) and mtDNA
gtcatcaaaaagctattagtgggagtagagtttgaagtccttgagagaggattatgatgcgactgtgagtgcgttcgtagtttgagtttgctaggcagaatagtaatgaggatgtaagtc

SEQ ID NO: 78749 - DNA, 120 bp, Homo sapiens; identical to SEQ ID NO: 62680
  misc_feature: 559 for SV(C|O) and mtDNA

SEQ ID NO: 78750 - DNA, 120 bp, Homo sapiens
  misc_feature: 559 for SV(C|O) and mtDNA
gtagagggagtatagggctgtgactagtatgttgagtcctgtaagtaggagagtgatatttgatcaggagaacgtggttactagcacagagagttctcccagtaggttaatagtgggggg

SEQ ID NO: 78751 - DNA, 120 bp, Homo sapiens; identical to SEQ ID NO: 53898
  misc_feature: 559 for SV(C|O) and mtDNA

SEQ ID NO: 78752 - DNA, 120 bp, Homo sapiens
  misc_feature: 559 for SV(C|O) and mtDNA
atcctagtcctcatcgccctcccatccctgcgcatcctttacataacagacgaggtcaacgatccctcccttaccatcaaatcaattggccaccaatggtactgaacctacgagtacacc

SEQ ID NO: 78753 - DNA, 120 bp, Homo sapiens
  misc_feature: 559 for SV(C|O) and mtDNA
aactcaaaggacctggcggtgcttcatatccctctagaggagcctgttctgtaatcgataaaccccgatcaacctcaccacctcttgctcagcctatataccgccatcttcagcaaaccc

SEQ ID NO: 78754 - DNA, 120 bp, Homo sapiens
  misc_feature: 559 for SV(C|O) and mtDNA
catcaacaaccgctatgtaattcgtacattactgccagccaccatgaatattgtacggtaccataaatacttgaccacctgtagtacataaaaacccaatccacatcaaaaccccctccc

SEQ ID NO: 78755 - DNA, 120 bp, Homo sapiens
  misc_feature: 559 for SV(C|O) and mtDNA
cccaccccagtctcagccctactccactcaagcactatagttgtagcaggaatcttcttactcatccgcttccaccccctagcagaaaatagcccactaatccaaactctaacactatgc

SEQ ID NO: 78756 - DNA, 120 bp, Homo sapiens
  misc_feature: 559 for SV(C|O) and mtDNA
cagataaagaatattgaggcgccattggcgtgaaggtagcggatgattcagccataatttacgtctcgagtgatgtgggcgattgatgaaaaggcggttgaggcgtctggtgagtagtgc

SEQ ID NO: 78757 - DNA, 120 bp, Homo sapiens
  misc_feature: 559 for SV(C|O) and mtDNA
aaaaaaggcgggagaagccccggcaggtttgaagctgcttcttcgaatttgcaattcaatatgaaaatcacctcggagctggtaaaaagaggcctaacccctgtctttagatttacagtc

SEQ ID NO: 78758 - DNA, 120 bp, Homo sapiens; identical to SEQ ID NO: 59768
  misc_feature: 559 for SV(C|O) and mtDNA

SEQ ID NO: 78759 - DNA, 120 bp, Homo sapiens; identical to SEQ ID NO: 62254
  misc_feature: 559 for SV(C|O) and mtDNA

SEQ ID NO: 78760 - DNA, 120 bp, Homo sapiens
  misc_feature: 559 for SV(C|O) and mtDNA
cggcatcaaccaaccacacctagcattcctgcacatctgtacccacgccttcttcaaagccatactatttatgtgctccgggtccatcatccacaaccttaacaatgaacaagatatccg

SEQ ID NO: 78761 - DNA, 120 bp, Homo sapiens; identical to SEQ ID NO: 53751
  misc_feature: 559 for SV(C|O) and mtDNA

SEQ ID NO: 78762 - DNA, 120 bp, Homo sapiens
  misc_feature: 559 for SV(C|O) and mtDNA
accagtaagctacccttttaccatcattggacaagtagcatccgtactatacttcacaacaatcctaatcctaataccaactatctccctaattgaaaacaaaatactcaaatgggcctg

SEQ ID NO: 78763 - DNA, 120 bp, Homo sapiens; identical to SEQ ID NO: 60247
  misc_feature: 559 for SV(C|O) and mtDNA

SEQ ID NO: 78764 - DNA, 120 bp, Homo sapiens; identical to SEQ ID NO: 63010
  misc_feature: 558 for SV(C|O) and mtDNA

SEQ ID NO: 78765 - DNA, 120 bp, Homo sapiens
  misc_feature: 558 for SV(C|O) and mtDNA
tttaattatgcctttttgggttgaggtgatgatggaggtggagatttggtgctgtgaaattgttttaggtaatagcttttctagtcaggttaggtctaggaggagtaggggcaggttttg

SEQ ID NO: 78766 - DNA, 120 bp, Homo sapiens; identical to SEQ ID NO: 54705
  misc_feature: 558 for SV(C|O) and mtDNA

SEQ ID NO: 78767 - DNA, 120 bp, Homo sapiens
  misc_feature: 558 for SV(C|O) and mtDNA
gtgggagtagagtttgaagtccttgagagaggattatgatgcgactgtgagtgcgttcgtagtttgagtttgctaggcagaatagtaatgaggatgtaagtccgtgggcgattatgagaa

SEQ ID NO: 78768 - DNA, 120 bp, Homo sapiens
  misc_feature: 558 for SV(C|O) and mtDNA
atggacccggagcacataaatagtatggctttgaagaaggcgtgggtacagatgtgcaggaatgctaggtgtggttggttgatgccgattgtaactattatgagtcctagttgacttgaa

SEQ ID NO: 78769 - DNA, 120 bp, Homo sapiens
  misc_feature: 558 for SV(C|O) and mtDNA
ttacgtctcgagtgatgtgggcgattgatgaaaaggcggttgaggcgtctggtgagtagtgcatggctaggaatagtcctgtggtgatttggaggatcaggcaggcgccaaggagtgagc

SEQ ID NO: 78770 - DNA, 120 bp, Homo sapiens
  misc_feature: 558 for SV(C|O) and mtDNA
tatgcccttttcctaacactcacaacaaaactaactaatactaacatctcagacgctcaggaaatagaaaccgtctgaactatcctgcccgccatcatcctagtcctcatcgccctccca

SEQ ID NO: 78771 - DNA, 120 bp, Homo sapiens; identical to SEQ ID NO: 57830
  misc_feature: 558 for SV(C|O) and mtDNA

SEQ ID NO: 78772 - DNA, 120 bp, Homo sapiens; identical to SEQ ID NO: 60378
  misc_feature: 558 for SV(C|O) and mtDNA

SEQ ID NO: 78773 - DNA, 120 bp, Homo sapiens
  misc_feature: 558 for SV(C|O) and mtDNA
tgaagaataaggcgaaggggcctgcggcgtattcgatgttgaagcctgagactagttcggactctccttcggcaaggtcgaagggggttcggttggtctctgctagtgtggagataaatc

SEQ ID NO: 78774 - DNA, 120 bp, Homo sapiens
  misc_feature: 558 for SV(C|O) and mtDNA
tcatgagctgtccccacattaggcttaaaaacagatgcaattcccggacgtctaaaccaaaccactttcaccgctacacgaccgggggtatactacggtcaatgctctgaaatctgtgga

SEQ ID NO: 78775 - DNA, 120 bp, Homo sapiens
  misc_feature: 558 for SV(C|O) and mtDNA
tactgtttgcattaataaattaaagctccatagggtcttctcgtcttgctgtgtcatgcccgcctcttcacgggcaggtcaatttcactggttaaaagtaagagacagctgaaccctcgt

SEQ ID NO: 78776 - DNA, 120 bp, Homo sapiens
  misc_feature: 558 for SV(C|O) and mtDNA
taacactcacaacaaaactaactaatactaacatctcagacgctcaggaaatagaaaccgtctgaactatcctgcccgccatcatcctagtcctcatcgccctcccatccctgcgcatcc

SEQ ID NO: 78777 - DNA, 120 bp, Homo sapiens; identical to SEQ ID NO: 62030
  misc_feature: 558 for SV(C|O) and mtDNA

SEQ ID NO: 78778 - DNA, 120 bp, Homo sapiens
  misc_feature: 558 for SV(C|O) and mtDNA
cccatcgtcctagaattaattcccctaaaaatctttgaaatagggcccgtatttaccctatagcaccccctctaccccctctagagcccactgtaaagctaacttagcattaacctttta

SEQ ID NO: 78779 - DNA, 120 bp, Homo sapiens; identical to SEQ ID NO: 61463
  misc_feature: 558 for SV(C|O) and mtDNA

SEQ ID NO: 78780 - DNA, 120 bp, Homo sapiens; identical to SEQ ID NO: 62201
  misc_feature: 558 for SV(C|O) and mtDNA

SEQ ID NO: 78781 - DNA, 120 bp, Homo sapiens
  misc_feature: 558 for SV(C|O) and mtDNA
ccctctctcctactcctgctcgcatctgctatagtggaggccggagcaggaacaggttgaacagtctaccctcccttagcagggaactactcccaccctggagcctccgtagacctaacc

SEQ ID NO: 78782 - DNA, 120 bp, Homo sapiens
  misc_feature: 558 for SV(C|O) and mtDNA
aagacgccctcggcttacttctcttccttctctccttaatgacattaacactattctcaccagacctcctaggcgacccagacaattataccctagccaaccccttaaacacccctcccc

SEQ ID NO: 78783 - DNA, 120 bp, Homo sapiens
  misc_feature: 558 for SV(C|O) and mtDNA
atccgaaaaataggaggactactcaaaaccatacctctcacttcaacctccctcaccattggcagcctagcattagcaggaatacctttcctcacaggtttctactccaaagaccacatc

SEQ ID NO: 78784 - DNA, 120 bp, Homo sapiens
  misc_feature: 558 for SV(C|O) and mtDNA
ctaacatctcagacgctcaggaaatagaaaccgtctgaactatcctgcccgccatcatcctagtcctcatcgccctcccatccctgcgcatcctttacataacagacgaggtcaacgatc

SEQ ID NO: 78785 - DNA, 120 bp, Homo sapiens; identical to SEQ ID NO: 60865
  misc_feature: 558 for SV(C|O) and mtDNA

SEQ ID NO: 78786 - DNA, 120 bp, Homo sapiens
  misc_feature: 558 for SV(C|O) and mtDNA
atactaacatctcagacgctcaggaaatagaaaccgtctgaactatcctgcccgccatcatcctagtcctcatcgccctcccatccctgcgcatcctttacataacagacgaggtcaacg

SEQ ID NO: 78787 - DNA, 120 bp, Homo sapiens
  misc_feature: 558 for SV(C|O) and mtDNA
cgtgcaagaataggaggtggagtgctgctagggctgcaataatgaagggcaagatgaagtgaaaggtaaagaatcgtgtgagggtgggactgtctactgagtagcctcctcagattcatt

SEQ ID NO: 78788 - DNA, 120 bp, Homo sapiens; identical to SEQ ID NO: 56265
  misc_feature: 558 for SV(C|O) and mtDNA

SEQ ID NO: 78789 - DNA, 120 bp, Homo sapiens; identical to SEQ ID NO: 63238
  misc_feature: 558 for SV(C|O) and mtDNA

SEQ ID NO: 78790 - DNA, 120 bp, Homo sapiens; identical to SEQ ID NO: 63225
  misc_feature: 558 for SV(C|O) and mtDNA

SEQ ID NO: 78791 - DNA, 120 bp, Homo sapiens
  misc_feature: 558 for SV(C|O) and mtDNA
agtcatcaaaaagctattagtgggagtagagtttgaagtccttgagagaggattatgatgcgactgtgagtgcgttcgtagtttgagtttgctaggcagaatagtaatgaggatgtaagt

SEQ ID NO: 78792 - DNA, 120 bp, Homo sapiens
  misc_feature: 558 for SV(C|O) and mtDNA
acccatcaacaaccgctatgtaattcgtacattactgccagccaccatgaatattgtacggtaccataaatacttgaccacctgtagtacataaaaacccaatccacatcaaaaccccct

SEQ ID NO: 78793 - DNA, 120 bp, Homo sapiens
  misc_feature: 558 for SV(C|O) and mtDNA
actccactcaagcactatagttgtagcaggaatcttcttactcatccgcttccaccccctagcagaaaatagcccactaatccaaactctaacactatgcttaggcgctatcaccactct

SEQ ID NO: 78794 - DNA, 120 bp, Homo sapiens; identical to SEQ ID NO: 63016
  misc_feature: 557 for SV(C|O) and mtDNA

SEQ ID NO: 78795 - DNA, 120 bp, Homo sapiens
  misc_feature: 557 for SV(C|O) and mtDNA
taaaactcaaaggacctggcggtgcttcatatccctctagaggagcctgttctgtaatcgataaaccccgatcaacctcaccacctcttgctcagcctatataccgccatcttcagcaaa

SEQ ID NO: 78796 - DNA, 120 bp, Homo sapiens
  misc_feature: 557 for SV(C|O) and mtDNA
ttcgaccctatatcccccgcccgcgtccctttctccataaaattcttcttagtagctattaccttcttattatttgatctagaaattgccctccttttacccctaccatgagccctacaa

SEQ ID NO: 78797 - DNA, 120 bp, Homo sapiens
  misc_feature: 557 for SV(C|O) and mtDNA
caaccacccacagcctaattattagcatcatccctctactattttttaaccaaatcaacaacaacctatttagctgttccccaaccttttcctccgaccccctaacaacccccctcctaa

SEQ ID NO: 78798 - DNA, 120 bp, Homo sapiens; identical to SEQ ID NO: 61198
  misc_feature: 557 for SV(C|O) and mtDNA

SEQ ID NO: 78799 - DNA, 120 bp, Homo sapiens; identical to SEQ ID NO: 62574
  misc_feature: 557 for SV(C|O) and mtDNA

SEQ ID NO: 78800 - DNA, 120 bp, Homo sapiens
  misc_feature: 557 for SV(C|O) and mtDNA
agttacaatcggcatcaaccaaccacacctagcattcctgcacatctgtacccacgccttcttcaaagccatactatttatgtgctccgggtccatcatccacaaccttaacaatgaaca

SEQ ID NO: 78801 - DNA, 120 bp, Homo sapiens
  misc_feature: 557 for SV(C|O) and mtDNA
tgttattattctgaattttgggggaggttatatgggtttaatagtttttttaatttatttagggggaatgatggttgtctttggatatactacagcgatggctattgaggagtatcctga

SEQ ID NO: 78802 - DNA, 120 bp, Homo sapiens
  misc_feature: 557 for SV(C|O) and mtDNA
acacaaacgcctgagccctatctattactctcatcgctacctccctgacaagcgcctatagcactcgaataattcttctcaccctaacaggtcaacctcgcttccccacccttactaaca

SEQ ID NO: 78803 - DNA, 120 bp, Homo sapiens
  misc_feature: 557 for SV(C|O) and mtDNA
caaacatatcatacacaaacgcctgagccctatctattactctcatcgctacctccctgacaagcgcctatagcactcgaataattcttctcaccctaacaggtcaacctcgcttcccca

SEQ ID NO: 78804 - DNA, 120 bp, Homo sapiens
  misc_feature: 557 for SV(C|O) and mtDNA
cttaaaactcaaaggacctggcggtgcttcatatccctctagaggagcctgttctgtaatcgataaaccccgatcaacctcaccacctcttgctcagcctatataccgccatcttcagca

SEQ ID NO: 78805 - DNA, 120 bp, Homo sapiens; identical to SEQ ID NO: 62079
  misc_feature: 557 for SV(C|O) and mtDNA

SEQ ID NO: 78806 - DNA, 120 bp, Homo sapiens
  misc_feature: 557 for SV(C|O) and mtDNA
atgcatggagagctcccgtgagtggttaatagggtgatagacctgtgatccatcgtgatgtcttatttaaggggaacgtgtgggctatttaggctttatggccctgaagtaggaaccaga

SEQ ID NO: 78807 - DNA, 120 bp, Homo sapiens
  misc_feature: 557 for SV(C|O) and mtDNA
actaactaatactaacatctcagacgctcaggaaatagaaaccgtctgaactatcctgcccgccatcatcctagtcctcatcgccctcccatccctgcgcatcctttacataacagacga

SEQ ID NO: 78808 - DNA, 120 bp, Homo sapiens
  misc_feature: 557 for SV(C|O) and mtDNA
taggctgagcaagaggtggtgaggttgatcggggtttatcgattacagaacaggctcctctagagggatatgaagcaccgccaggtcctttgagttttaagctgtggctcgtagtgttct

SEQ ID NO: 78809 - DNA, 120 bp, Homo sapiens
  misc_feature: 557 for SV(C|O) and mtDNA
taactaatactaacatctcagacgctcaggaaatagaaaccgtctgaactatcctgcccgccatcatcctagtcctcatcgccctcccatccctgcgcatcctttacataacagacgagg

SEQ ID NO: 78810 - DNA, 120 bp, Homo sapiens
  misc_feature: 557 for SV(C|O) and mtDNA
taacatctcagacgctcaggaaatagaaaccgtctgaactatcctgcccgccatcatcctagtcctcatcgccctcccatccctgcgcatcctttacataacagacgaggtcaacgatcc

SEQ ID NO: 78811 - DNA, 120 bp, Homo sapiens
  misc_feature: 557 for SV(C|O) and mtDNA
ctaataagtggctcctttaacctctccacccttatcacaacacaagaacacctctgattactcctgccatcatgacccttggccataatatgatttatctccacactagcagagaccaac

SEQ ID NO: 78812 - DNA, 120 bp, Homo sapiens
  misc_feature: 557 for SV(C|O) and mtDNA
ggtcggtttctatctacttcaaattcctccctgtacgaaaggacaagagaaataaggcctacttcacaaagcgccttcccccgtaaatgatatcatctcaacttagtattatacccacac

SEQ ID NO: 78813 - DNA, 120 bp, Homo sapiens
  misc_feature: 557 for SV(C|O) and mtDNA
gtgcaagaataggaggtggagtgctgctagggctgcaataatgaagggcaagatgaagtgaaaggtaaagaatcgtgtgagggtgggactgtctactgagtagcctcctcagattcattg

SEQ ID NO: 78814 - DNA, 120 bp, Homo sapiens; identical to SEQ ID NO: 63242
  misc_feature: 557 for SV(C|O) and mtDNA

SEQ ID NO: 78815 - DNA, 120 bp, Homo sapiens; identical to SEQ ID NO: 60805
  misc_feature: 557 for SV(C|O) and mtDNA

SEQ ID NO: 78816 - DNA, 120 bp, Homo sapiens
  misc_feature: 557 for SV(C|O) and mtDNA
aacatatcatacacaaacgcctgagccctatctattactctcatcgctacctccctgacaagcgcctatagcactcgaataattcttctcaccctaacaggtcaacctcgcttccccacc

SEQ ID NO: 78817 - DNA, 120 bp, Homo sapiens
  misc_feature: 557 for SV(C|O) and mtDNA
ggtaggaagttttttcataggaggtgtatgagttggtcgtagcggaatcgggggtatgctgttcgaattcataagaacagggaggttagaagtagggtcttggtgacaaaatatgttgtg

SEQ ID NO: 78818 - DNA, 120 bp, Homo sapiens
  misc_feature: 557 for SV(C|O) and mtDNA
ccctattactatccatcctcatcctagcaataatccccatcctccatatatccaaacaacaaagcataatatttcgcccactaagccaatcactttattgactcctagccgcagacctcc

SEQ ID NO: 78819 - DNA, 120 bp, Homo sapiens; identical to SEQ ID NO: 62676
  misc_feature: 557 for SV(C|O) and mtDNA

SEQ ID NO: 78820 - DNA, 120 bp, Homo sapiens
  misc_feature: 557 for SV(C|O) and mtDNA
atttgggcaaaaagccggttagcgggggcaggcctcctagggagaggagggtggatggaattaagggtgttagtcatgttagcttgtttcaggtgcgagatagtagtagggtcgtggtgc

SEQ ID NO: 78821 - DNA, 120 bp, Homo sapiens; identical to SEQ ID NO: 63024
  misc_feature: 557 for SV(C|O) and mtDNA

SEQ ID NO: 78822 - DNA, 120 bp, Homo sapiens
  misc_feature: 557 for SV(C|O) and mtDNA
ctccactcaagcactatagttgtagcaggaatcttcttactcatccgcttccaccccctagcagaaaatagcccactaatccaaactctaacactatgcttaggcgctatcaccactctg

SEQ ID NO: 78823 - DNA, 120 bp, Homo sapiens; identical to SEQ ID NO: 60044
  misc_feature: 557 for SV(C|O) and mtDNA

SEQ ID NO: 78824 - DNA, 120 bp, Homo sapiens
  misc_feature: 557 for SV(C|O) and mtDNA
aatttacgtctcgagtgatgtgggcgattgatgaaaaggcggttgaggcgtctggtgagtagtgcatggctaggaatagtcctgtggtgatttggaggatcaggcaggcgccaaggagtg

SEQ ID NO: 78825 - DNA, 120 bp, Homo sapiens
  misc_feature: 557 for SV(C|O) and mtDNA
aatcggcatcaaccaaccacacctagcattcctgcacatctgtacccacgccttcttcaaagccatactatttatgtgctccgggtccatcatccacaaccttaacaatgaacaagatat

SEQ ID NO: 78826 - DNA, 120 bp, Homo sapiens
  misc_feature: 557 for SV(C|O) and mtDNA
accgctgcttcgcaggcggcaaagactagtatggcaataggcacaatattggctaagagggagtgggtgttgagggttatgagagtagctataatgaacagtgatagtattattccttct

SEQ ID NO: 78827 - DNA, 120 bp, Homo sapiens
  misc_feature: 556 for SV(C|O) and mtDNA
tttcatgcccatcgtcctagaattaattcccctaaaaatctttgaaatagggcccgtatttaccctatagcaccccctctaccccctctagagcccactgtaaagctaacttagcattaa

SEQ ID NO: 78828 - DNA, 120 bp, Homo sapiens
  misc_feature: 556 for SV(C|O) and mtDNA
ttcttggtctaggcacatgaatattgttgtggggaagagactgataataaaggtggatgcgacaatggattttacataatgggggtatgagttttttttgttagggttaacgagggtggt

SEQ ID NO: 78829 - DNA, 120 bp, Homo sapiens
  misc_feature: 556 for SV(C|O) and mtDNA
ttcgtgccagccaccgcggtcacacgattaacccaagtcaatagaagccggcgtaaagagtgttttagatcaccccctccccaataaagctaaaactcacctgagttgtaaaaaactcca

SEQ ID NO: 78830 - DNA, 120 bp, Homo sapiens
  misc_feature: 556 for SV(C|O) and mtDNA
ctccctctctcctactcctgctcgcatctgctatagtggaggccggagcaggaacaggttgaacagtctaccctcccttagcagggaactactcccaccctggagcctccgtagacctaa

SEQ ID NO: 78831 - DNA, 120 bp, Homo sapiens
  misc_feature: 556 for SV(C|O) and mtDNA
tgtatgcccttttcctaacactcacaacaaaactaactaatactaacatctcagacgctcaggaaatagaaaccgtctgaactatcctgcccgccatcatcctagtcctcatcgccctcc

SEQ ID NO: 78832 - DNA, 120 bp, Homo sapiens
  misc_feature: 556 for SV(C|O) and mtDNA
tccctctctcctactcctgctcgcatctgctatagtggaggccggagcaggaacaggttgaacagtctaccctcccttagcagggaactactcccaccctggagcctccgtagacctaac

SEQ ID NO: 78833 - DNA, 120 bp, Homo sapiens
  misc_feature: 556 for SV(C|O) and mtDNA
tccctctacatatttaccacaacacaatggggctcactcacccaccacattaacaacataaaaccctcattcacacgagaaaacaccctcatgttcatacacctatcccccattctcctc

SEQ ID NO: 78834 - DNA, 120 bp, Homo sapiens
  misc_feature: 556 for SV(C|O) and mtDNA
ggagtagagtttgaagtccttgagagaggattatgatgcgactgtgagtgcgttcgtagtttgagtttgctaggcagaatagtaatgaggatgtaagtccgtgggcgattatgagaatga

SEQ ID NO: 78835 - DNA, 120 bp, Homo sapiens
  misc_feature: 556 for SV(C|O) and mtDNA
cacgccctcataatcattttccttatctgcttcctagtcctgtatgcccttttcctaacactcacaacaaaactaactaatactaacatctcagacgctcaggaaatagaaaccgtctga

SEQ ID NO: 78836 - DNA, 120 bp, Homo sapiens
  misc_feature: 556 for SV(C|O) and mtDNA
atttacgtctcgagtgatgtgggcgattgatgaaaaggcggttgaggcgtctggtgagtagtgcatggctaggaatagtcctgtggtgatttggaggatcaggcaggcgccaaggagtga

SEQ ID NO: 78837 - DNA, 120 bp, Homo sapiens
  misc_feature: 556 for SV(C|O) and mtDNA
tcaacaatatactctccggacaatgaaccataaccaatactaccaatcaatactcatcattaataatcataatggctatagcaataaaactaggaatagccccctttcacttctgggtcc

SEQ ID NO: 78838 - DNA, 120 bp, Homo sapiens; identical to SEQ ID NO: 53806
  misc_feature: 556 for SV(C|O) and mtDNA

SEQ ID NO: 78839 - DNA, 120 bp, Homo sapiens
  misc_feature: 556 for SV(C|O) and mtDNA
tacacaaacgcctgagccctatctattactctcatcgctacctccctgacaagcgcctatagcactcgaataattcttctcaccctaacaggtcaacctcgcttccccacccttactaac

SEQ ID NO: 78840 - DNA, 120 bp, Homo sapiens
  misc_feature: 556 for SV(C|O) and mtDNA
gtttcaggtgcgagatagtagtagggtcgtggtgctggagtttaagttgagtagtaggaatgcggtagtagttaggataatataaatagttaaattaagaatggttatgttagggttgta

SEQ ID NO: 78841 - DNA, 120 bp, Homo sapiens
  misc_feature: 556 for SV(C|O) and mtDNA
ccacctgtccaaaaaggccttcgatacgggataatcctatttattacctcagaagtttttttcttcgcaggatttttctgagccttttaccactccagcctagcccctaccccccaatta

SEQ ID NO: 78842 - DNA, 120 bp, Homo sapiens; identical to SEQ ID NO: 62617
  misc_feature: 556 for SV(C|O) and mtDNA

SEQ ID NO: 78843 - DNA, 120 bp, Homo sapiens
  misc_feature: 556 for SV(C|O) and mtDNA
ctcaggatactcctcaatagccatcgctgtagtatatccaaagacaaccatcattccccctaaataaattaaaaaaactattaaacccatataacctcccccaaaattcagaataataac

SEQ ID NO: 78844 - DNA, 120 bp, Homo sapiens
  misc_feature: 556 for SV(C|O) and mtDNA
aaacatatcatacacaaacgcctgagccctatctattactctcatcgctacctccctgacaagcgcctatagcactcgaataattcttctcaccctaacaggtcaacctcgcttccccac

SEQ ID NO: 78845 - DNA, 120 bp, Homo sapiens
  misc_feature: 556 for SV(C|O) and mtDNA
acatatcatacacaaacgcctgagccctatctattactctcatcgctacctccctgacaagcgcctatagcactcgaataattcttctcaccctaacaggtcaacctcgcttccccaccc

SEQ ID NO: 78846 - DNA, 120 bp, Homo sapiens
  misc_feature: 556 for SV(C|O) and mtDNA
gggagtagagtttgaagtccttgagagaggattatgatgcgactgtgagtgcgttcgtagtttgagtttgctaggcagaatagtaatgaggatgtaagtccgtgggcgattatgagaatg

SEQ ID NO: 78847 - DNA, 120 bp, Homo sapiens; identical to SEQ ID NO: 60601
  misc_feature: 556 for SV(C|O) and mtDNA

SEQ ID NO: 78848 - DNA, 120 bp, Homo sapiens; identical to SEQ ID NO: 63234
  misc_feature: 556 for SV(C|O) and mtDNA

SEQ ID NO: 78849 - DNA, 120 bp, Homo sapiens; identical to SEQ ID NO: 54982
  misc_feature: 556 for SV(C|O) and mtDNA

SEQ ID NO: 78850 - DNA, 120 bp, Homo sapiens; identical to SEQ ID NO: 62033
  misc_feature: 556 for SV(C|O) and mtDNA

SEQ ID NO: 78851 - DNA, 120 bp, Homo sapiens; identical to SEQ ID NO: 60114
  misc_feature: 556 for SV(C|O) and mtDNA

SEQ ID NO: 78852 - DNA, 120 bp, Homo sapiens
  misc_feature: 556 for SV(C|O) and mtDNA
actaatactaacatctcagacgctcaggaaatagaaaccgtctgaactatcctgcccgccatcatcctagtcctcatcgccctcccatccctgcgcatcctttacataacagacgaggtc

SEQ ID NO: 78853 - DNA, 120 bp, Homo sapiens
  misc_feature: 556 for SV(C|O) and mtDNA
ccggagtaatccaggtcggtttctatctacttcaaattcctccctgtacgaaaggacaagagaaataaggcctacttcacaaagcgccttcccccgtaaatgatatcatctcaacttagt

SEQ ID NO: 78854 - DNA, 120 bp, Homo sapiens
  misc_feature: 556 for SV(C|O) and mtDNA
atactccctctacatatttaccacaacacaatggggctcactcacccaccacattaacaacataaaaccctcattcacacgagaaaacaccctcatgttcatacacctatcccccattct

SEQ ID NO: 78855 - DNA, 120 bp, Homo sapiens
  misc_feature: 555 for SV(C|O) and mtDNA
tcgaccctatatcccccgcccgcgtccctttctccataaaattcttcttagtagctattaccttcttattatttgatctagaaattgccctccttttacccctaccatgagccctacaaa

SEQ ID NO: 78856 - DNA, 120 bp, Homo sapiens
  misc_feature: 555 for SV(C|O) and mtDNA
gttacaatcggcatcaaccaaccacacctagcattcctgcacatctgtacccacgccttcttcaaagccatactatttatgtgctccgggtccatcatccacaaccttaacaatgaacaa

SEQ ID NO: 78857 - DNA, 120 bp, Homo sapiens
  misc_feature: 555 for SV(C|O) and mtDNA
tccttgacgttgacaatcgagtagtactcccgattgaagcccccattcgtataataattacatcacaagacgtcttgcactcatgagctgtccccacattaggcttaaaaacagatgcaa

SEQ ID NO: 78858 - DNA, 120 bp, Homo sapiens; identical to SEQ ID NO: 63221
  misc_feature: 555 for SV(C|O) and mtDNA

SEQ ID NO: 78859 - DNA, 120 bp, Homo sapiens
  misc_feature: 555 for SV(C|O) and mtDNA
ttcagccataatttacgtctcgagtgatgtgggcgattgatgaaaaggcggttgaggcgtctggtgagtagtgcatggctaggaatagtcctgtggtgatttggaggatcaggcaggcgc

SEQ ID NO: 78860 - DNA, 120 bp, Homo sapiens; identical to SEQ ID NO: 62647
  misc_feature: 555 for SV(C|O) and mtDNA

SEQ ID NO: 78861 - DNA, 120 bp, Homo sapiens
  misc_feature: 555 for SV(C|O) and mtDNA
tcggtttctatctacttcaaattcctccctgtacgaaaggacaagagaaataaggcctacttcacaaagcgccttcccccgtaaatgatatcatctcaacttagtattatacccacaccc

SEQ ID NO: 78862 - DNA, 120 bp, Homo sapiens
  misc_feature: 555 for SV(C|O) and mtDNA
tcatgcccatcgtcctagaattaattcccctaaaaatctttgaaatagggcccgtatttaccctatagcaccccctctaccccctctagagcccactgtaaagctaacttagcattaacc

SEQ ID NO: 78863 - DNA, 120 bp, Homo sapiens
  misc_feature: 555 for SV(C|O) and mtDNA
ggggggttgttagggggtcggaggaaaaggttggggaacagctaaataggttgttgttgatttggttaaaaaatagtagagggatgatgctaataattaggctgtgggtggttgtgttga

SEQ ID NO: 78864 - DNA, 120 bp, Homo sapiens
  misc_feature: 555 for SV(C|O) and mtDNA
taggtactgtttgcattaataaattaaagctccatagggtcttctcgtcttgctgtgtcatgcccgcctcttcacgggcaggtcaatttcactggttaaaagtaagagacagctgaaccc

SEQ ID NO: 78865 - DNA, 120 bp, Homo sapiens; identical to SEQ ID NO: 55024
  misc_feature: 555 for SV(C|O) and mtDNA

SEQ ID NO: 78866 - DNA, 120 bp, Homo sapiens
  misc_feature: 555 for SV(C|O) and mtDNA
gtttgaagtccttgagagaggattatgatgcgactgtgagtgcgttcgtagtttgagtttgctaggcagaatagtaatgaggatgtaagtccgtgggcgattatgagaatgactgcgccg

SEQ ID NO: 78867 - DNA, 120 bp, Homo sapiens
  misc_feature: 555 for SV(C|O) and mtDNA
gtattgactcacccatcaacaaccgctatgtaattcgtacattactgccagccaccatgaatattgtacggtaccataaatacttgaccacctgtagtacataaaaacccaatccacatc

SEQ ID NO: 78868 - DNA, 120 bp, Homo sapiens
  misc_feature: 555 for SV(C|O) and mtDNA
ggttttggctcgtaagaaggcctagataggggattgtgcggtgtgtgatggtagggtagaatccgagtatgttggagaaataaaatgtgcatagtggggattttattttaagtttgttgg

SEQ ID NO: 78869 - DNA, 120 bp, Homo sapiens
  misc_feature: 555 for SV(C|O) and mtDNA
gctcgcagtgcgccgatcagggcgtagtttgagtttgatgctcaccctgatcagaggattgagtaaacggctaggctagaggtggctagaataaataggaggcctaggttgaggttgacc

SEQ ID NO: 78870 - DNA, 120 bp, Homo sapiens; identical to SEQ ID NO: 61997
  misc_feature: 555 for SV(C|O) and mtDNA

SEQ ID NO: 78871 - DNA, 120 bp, Homo sapiens
  misc_feature: 555 for SV(C|O) and mtDNA
ccatcaacaaccgctatgtaattcgtacattactgccagccaccatgaatattgtacggtaccataaatacttgaccacctgtagtacataaaaacccaatccacatcaaaaccccctcc

SEQ ID NO: 78872 - DNA, 120 bp, Homo sapiens
  misc_feature: 555 for SV(C|O) and mtDNA
gcatggagagctcccgtgagtggttaatagggtgatagacctgtgatccatcgtgatgtcttatttaaggggaacgtgtgggctatttaggctttatggccctgaagtaggaaccagatg

SEQ ID NO: 78873 - DNA, 120 bp, Homo sapiens; identical to SEQ ID NO: 61030
  misc_feature: 555 for SV(C|O) and mtDNA

SEQ ID NO: 78874 - DNA, 120 bp, Homo sapiens; identical to SEQ ID NO: 63235
  misc_feature: 555 for SV(C|O) and mtDNA

SEQ ID NO: 78875 - DNA, 120 bp, Homo sapiens
  misc_feature: 555 for SV(C|O) and mtDNA
actagcacagagagttctcccagtaggttaatagtggggggtaaggcgaggttagcgaggcttgctagaagtcatcaaaaagctattagtgggagtagagtttgaagtccttgagagagg

SEQ ID NO: 78876 - DNA, 120 bp, Homo sapiens; identical to SEQ ID NO: 54181
  misc_feature: 555 for SV(C|O) and mtDNA

SEQ ID NO: 78877 - DNA, 120 bp, Homo sapiens
  misc_feature: 555 for SV(C|O) and mtDNA
aatcagtgcgagcttagcgctgtgatgagtgtgcctgcaaagatggtagagtagatgacgggttgggccaggggattaattagtacgggaagggtataaccaacattttcggggtatggg

SEQ ID NO: 78878 - DNA, 120 bp, Homo sapiens
  misc_feature: 555 for SV(C|O) and mtDNA
ccagtaagctacccttttaccatcattggacaagtagcatccgtactatacttcacaacaatcctaatcctaataccaactatctccctaattgaaaacaaaatactcaaatgggcctgt

SEQ ID NO: 78879 - DNA, 120 bp, Homo sapiens
  misc_feature: 555 for SV(C|O) and mtDNA
catactagtcacagccctatactccctctacatatttaccacaacacaatggggctcactcacccaccacattaacaacataaaaccctcattcacacgagaaaacaccctcatgttcat

SEQ ID NO: 78880 - DNA, 120 bp, Homo sapiens
  misc_feature: 555 for SV(C|O) and mtDNA
cactcacaacaaaactaactaatactaacatctcagacgctcaggaaatagaaaccgtctgaactatcctgcccgccatcatcctagtcctcatcgccctcccatccctgcgcatccttt

SEQ ID NO: 78881 - DNA, 120 bp, Homo sapiens; identical to SEQ ID NO: 61095
  misc_feature: 555 for SV(C|O) and mtDNA

SEQ ID NO: 78882 - DNA, 120 bp, Homo sapiens
  misc_feature: 555 for SV(C|O) and mtDNA
cacaaacgcctgagccctatctattactctcatcgctacctccctgacaagcgcctatagcactcgaataattcttctcaccctaacaggtcaacctcgcttccccacccttactaacat

SEQ ID NO: 78883 - DNA, 120 bp, Homo sapiens
  misc_feature: 554 for SV(C|O) and mtDNA
ggtcttagctattgtgtgttcagatatgttaaagccactttcgtagtctattttgtgtcagctggagttttttacaactcaggtgagttttagctttattggggagggggtgatctaaaa

SEQ ID NO: 78884 - DNA, 120 bp, Homo sapiens
  misc_feature: 554 for SV(C|O) and mtDNA
actaataagtggctcctttaacctctccacccttatcacaacacaagaacacctctgattactcctgccatcatgacccttggccataatatgatttatctccacactagcagagaccaa

SEQ ID NO: 78885 - DNA, 120 bp, Homo sapiens
  misc_feature: 554 for SV(C|O) and mtDNA
ttggggcatttcactgtaaagaggtgttggttctcttaatctttaacttaaaaggttaatgctaagttagctttacagtgggctctagagggggtagagggggtgctatagggtaaatac

SEQ ID NO: 78886 - DNA, 120 bp, Homo sapiens
  misc_feature: 554 for SV(C|O) and mtDNA
taatactaacatctcagacgctcaggaaatagaaaccgtctgaactatcctgcccgccatcatcctagtcctcatcgccctcccatccctgcgcatcctttacataacagacgaggtcaa

SEQ ID NO: 78887 - DNA, 120 bp, Homo sapiens; identical to SEQ ID NO: 56007
  misc_feature: 554 for SV(C|O) and mtDNA

SEQ ID NO: 78888 - DNA, 120 bp, Homo sapiens
  misc_feature: 554 for SV(C|O) and mtDNA
caacaaaactaactaatactaacatctcagacgctcaggaaatagaaaccgtctgaactatcctgcccgccatcatcctagtcctcatcgccctcccatccctgcgcatcctttacataa

SEQ ID NO: 78889 - DNA, 120 bp, Homo sapiens
  misc_feature: 554 for SV(C|O) and mtDNA
ttaacaatgaacaagatatccgaaaaataggaggactactcaaaaccatacctctcacttcaacctccctcaccattggcagcctagcattagcaggaatacctttcctcacaggtttct

SEQ ID NO: 78890 - DNA, 120 bp, Homo sapiens
  misc_feature: 554 for SV(C|O) and mtDNA
cttcgaccctatatcccccgcccgcgtccctttctccataaaattcttcttagtagctattaccttcttattatttgatctagaaattgccctccttttacccctaccatgagccctaca

SEQ ID NO: 78891 - DNA, 120 bp, Homo sapiens
  misc_feature: 554 for SV(C|O) and mtDNA
cctctctcctactcctgctcgcatctgctatagtggaggccggagcaggaacaggttgaacagtctaccctcccttagcagggaactactcccaccctggagcctccgtagacctaacca

SEQ ID NO: 78892 - DNA, 120 bp, Homo sapiens
  misc_feature: 554 for SV(C|O) and mtDNA
tgcccttttcctaacactcacaacaaaactaactaatactaacatctcagacgctcaggaaatagaaaccgtctgaactatcctgcccgccatcatcctagtcctcatcgccctcccatc

SEQ ID NO: 78893 - DNA, 120 bp, Homo sapiens; identical to SEQ ID NO: 61879
  misc_feature: 554 for SV(C|O) and mtDNA

SEQ ID NO: 78894 - DNA, 120 bp, Homo sapiens
  misc_feature: 554 for SV(C|O) and mtDNA
tcctagtcctcatcgccctcccatccctgcgcatcctttacataacagacgaggtcaacgatccctcccttaccatcaaatcaattggccaccaatggtactgaacctacgagtacaccg

SEQ ID NO: 78895 - DNA, 120 bp, Homo sapiens; identical to SEQ ID NO: 53726
  misc_feature: 554 for SV(C|O) and mtDNA

SEQ ID NO: 78896 - DNA, 120 bp, Homo sapiens
  misc_feature: 554 for SV(C|O) and mtDNA
gtttaattatgcctttttgggttgaggtgatgatggaggtggagatttggtgctgtgaaattgttttaggtaatagcttttctagtcaggttaggtctaggaggagtaggggcaggtttt

SEQ ID NO: 78897 - DNA, 120 bp, Homo sapiens
  misc_feature: 554 for SV(C|O) and mtDNA
aagtggctcctttaacctctccacccttatcacaacacaagaacacctctgattactcctgccatcatgacccttggccataatatgatttatctccacactagcagagaccaaccgaac

SEQ ID NO: 78898 - DNA, 120 bp, Homo sapiens
  misc_feature: 554 for SV(C|O) and mtDNA
gtagtacgatgtctagtgatgagtttgctaatacaatgccagtcaggccgcctacggtgaaaagaaagatgaatcctagggctcagagcactgcagcagatcatttcatattgcttccgt

SEQ ID NO: 78899 - DNA, 120 bp, Homo sapiens; identical to SEQ ID NO: 62062
  misc_feature: 554 for SV(C|O) and mtDNA

SEQ ID NO: 78900 - DNA, 120 bp, Homo sapiens; identical to SEQ ID NO: 61048
  misc_feature: 554 for SV(C|O) and mtDNA

SEQ ID NO: 78901 - DNA, 120 bp, Homo sapiens
  misc_feature: 554 for SV(C|O) and mtDNA
agtttgaagtccttgagagaggattatgatgcgactgtgagtgcgttcgtagtttgagtttgctaggcagaatagtaatgaggatgtaagtccgtgggcgattatgagaatgactgcgcc

SEQ ID NO: 78902 - DNA, 120 bp, Homo sapiens
  misc_feature: 554 for SV(C|O) and mtDNA
gcttgtttcaggtgcgagatagtagtagggtcgtggtgctggagtttaagttgagtagtaggaatgcggtagtagttaggataatataaatagttaaattaagaatggttatgttagggt

SEQ ID NO: 78903 - DNA, 120 bp, Homo sapiens
  misc_feature: 554 for SV(C|O) and mtDNA
ccgtgagtggttaatagggtgatagacctgtgatccatcgtgatgtcttatttaaggggaacgtgtgggctatttaggctttatggccctgaagtaggaaccagatgtcggatacagttc

SEQ ID NO: 78904 - DNA, 120 bp, Homo sapiens
  misc_feature: 554 for SV(C|O) and mtDNA
caaaactaactaatactaacatctcagacgctcaggaaatagaaaccgtctgaactatcctgcccgccatcatcctagtcctcatcgccctcccatccctgcgcatcctttacataacag

SEQ ID NO: 78905 - DNA, 120 bp, Homo sapiens; identical to SEQ ID NO: 61737
  misc_feature: 554 for SV(C|O) and mtDNA

SEQ ID NO: 78906 - DNA, 120 bp, Homo sapiens
  misc_feature: 554 for SV(C|O) and mtDNA
agagtttgaagtccttgagagaggattatgatgcgactgtgagtgcgttcgtagtttgagtttgctaggcagaatagtaatgaggatgtaagtccgtgggcgattatgagaatgactgcg

SEQ ID NO: 78907 - DNA, 120 bp, Homo sapiens
  misc_feature: 554 for SV(C|O) and mtDNA
atatgggtttaatagtttttttaatttatttagggggaatgatggttgtctttggatatactacagcgatggctattgaggagtatcctgaggcatgggggtcaggggttgaggtcttgg

SEQ ID NO: 78908 - DNA, 120 bp, Homo sapiens
  misc_feature: 554 for SV(C|O) and mtDNA
cacattaggcttaaaaacagatgcaattcccggacgtctaaaccaaaccactttcaccgctacacgaccgggggtatactacggtcaatgctctgaaatctgtggagcaaaccacagttt

SEQ ID NO: 78909 - DNA, 120 bp, Homo sapiens; identical to SEQ ID NO: 53913
  misc_feature: 553 for SV(C|O) and mtDNA

SEQ ID NO: 78910 - DNA, 120 bp, Homo sapiens; identical to SEQ ID NO: 62717
  misc_feature: 553 for SV(C|O) and mtDNA

SEQ ID NO: 78911 - DNA, 120 bp, Homo sapiens
  misc_feature: 553 for SV(C|O) and mtDNA
aactgacaattaacagcccaatatctacaatcaaccaacaagtcattattaccctcactgtcaacccaacacaggcatgctcataaggaaaggttaaaaaaagtaaaaggaactcggcaa

SEQ ID NO: 78912 - DNA, 120 bp, Homo sapiens
  misc_feature: 553 for SV(C|O) and mtDNA
ttcctaacactcacaacaaaactaactaatactaacatctcagacgctcaggaaatagaaaccgtctgaactatcctgcccgccatcatcctagtcctcatcgccctcccatccctgcgc

SEQ ID NO: 78913 - DNA, 120 bp, Homo sapiens
  misc_feature: 553 for SV(C|O) and mtDNA
aggacctggcggtgcttcatatccctctagaggagcctgttctgtaatcgataaaccccgatcaacctcaccacctcttgctcagcctatataccgccatcttcagcaaaccctgatgaa

SEQ ID NO: 78914 - DNA, 120 bp, Homo sapiens
  misc_feature: 553 for SV(C|O) and mtDNA
cgagtcagctaaatactttgacgccggtggggatagcgatgattatggtagcggaggtgaaatatgctcgtgtgtctacgtctattcctactgtaaatatatggtgtgctcacacgataa

SEQ ID NO: 78915 - DNA, 120 bp, Homo sapiens
  misc_feature: 553 for SV(C|O) and mtDNA
ttaggtactgtttgcattaataaattaaagctccatagggtcttctcgtcttgctgtgtcatgcccgcctcttcacgggcaggtcaatttcactggttaaaagtaagagacagctgaacc

SEQ ID NO: 78916 - DNA, 120 bp, Homo sapiens; identical to SEQ ID NO: 58731
  misc_feature: 553 for SV(C|O) and mtDNA

SEQ ID NO: 78917 - DNA, 120 bp, Homo sapiens
  misc_feature: 553 for SV(C|O) and mtDNA
cctaatgcttaccgaacgaaaaattctaggctatatacaactacgcaaaggccccaacgttgtaggcccctacgggctactacaacccttcgctgacgccataaaactcttcaccaaaga

SEQ ID NO: 78918 - DNA, 120 bp, Homo sapiens
  misc_feature: 553 for SV(C|O) and mtDNA
gtgcgagcttagcgctgtgatgagtgtgcctgcaaagatggtagagtagatgacgggttgggccaggggattaattagtacgggaagggtataaccaacattttcggggtatgggcccga

SEQ ID NO: 78919 - DNA, 120 bp, Homo sapiens
  misc_feature: 553 for SV(C|O) and mtDNA
gtacgatgtctagtgatgagtttgctaatacaatgccagtcaggccgcctacggtgaaaagaaagatgaatcctagggctcagagcactgcagcagatcatttcatattgcttccgtgga

SEQ ID NO: 78920 - DNA, 120 bp, Homo sapiens; identical to SEQ ID NO: 60265
  misc_feature: 553 for SV(C|O) and mtDNA

SEQ ID NO: 78921 - DNA, 120 bp, Homo sapiens
  misc_feature: 553 for SV(C|O) and mtDNA
tatgtagagggagtatagggctgtgactagtatgttgagtcctgtaagtaggagagtgatatttgatcaggagaacgtggttactagcacagagagttctcccagtaggttaatagtggg

SEQ ID NO: 78922 - DNA, 120 bp, Homo sapiens
  misc_feature: 553 for SV(C|O) and mtDNA
caaagactagtatggcaataggcacaatattggctaagagggagtgggtgttgagggttatgagagtagctataatgaacagtgatagtattattccttctaggcatagtagggaggata

SEQ ID NO: 78923 - DNA, 120 bp, Homo sapiens
  misc_feature: 553 for SV(C|O) and mtDNA
tagttacaatcggcatcaaccaaccacacctagcattcctgcacatctgtacccacgccttcttcaaagccatactatttatgtgctccgggtccatcatccacaaccttaacaatgaac

SEQ ID NO: 78924 - DNA, 120 bp, Homo sapiens
  misc_feature: 553 for SV(C|O) and mtDNA
taacaatgaacaagatatccgaaaaataggaggactactcaaaaccatacctctcacttcaacctccctcaccattggcagcctagcattagcaggaatacctttcctcacaggtttcta

SEQ ID NO: 78925 - DNA, 120 bp, Homo sapiens
  misc_feature: 553 for SV(C|O) and mtDNA
tactagcacagagagttctcccagtaggttaatagtggggggtaaggcgaggttagcgaggcttgctagaagtcatcaaaaagctattagtgggagtagagtttgaagtccttgagagag

SEQ ID NO: 78926 - DNA, 120 bp, Homo sapiens
  misc_feature: 553 for SV(C|O) and mtDNA
caaacgcctgagccctatctattactctcatcgctacctccctgacaagcgcctatagcactcgaataattcttctcaccctaacaggtcaacctcgcttccccacccttactaacatta

SEQ ID NO: 78927 - DNA, 120 bp, Homo sapiens; identical to SEQ ID NO: 61531
  misc_feature: 553 for SV(C|O) and mtDNA

SEQ ID NO: 78928 - DNA, 120 bp, Homo sapiens; identical to SEQ ID NO: 58890
  misc_feature: 553 for SV(C|O) and mtDNA

SEQ ID NO: 78929 - DNA, 120 bp, Homo sapiens
  misc_feature: 553 for SV(C|O) and mtDNA
aaccatacctctcacttcaacctccctcaccattggcagcctagcattagcaggaatacctttcctcacaggtttctactccaaagaccacatcatcgaaaccgcaaacatatcatacac

SEQ ID NO: 78930 - DNA, 120 bp, Homo sapiens
  misc_feature: 553 for SV(C|O) and mtDNA
cctactccactcaagcactatagttgtagcaggaatcttcttactcatccgcttccaccccctagcagaaaatagcccactaatccaaactctaacactatgcttaggcgctatcaccac

SEQ ID NO: 78931 - DNA, 120 bp, Homo sapiens
  misc_feature: 553 for SV(C|O) and mtDNA
gtggctcctttaacctctccacccttatcacaacacaagaacacctctgattactcctgccatcatgacccttggccataatatgatttatctccacactagcagagaccaaccgaaccc

SEQ ID NO: 78932 - DNA, 120 bp, Homo sapiens
  misc_feature: 553 for SV(C|O) and mtDNA
gagtagagtttgaagtccttgagagaggattatgatgcgactgtgagtgcgttcgtagtttgagtttgctaggcagaatagtaatgaggatgtaagtccgtgggcgattatgagaatgac

SEQ ID NO: 78933 - DNA, 120 bp, Homo sapiens
  misc_feature: 553 for SV(C|O) and mtDNA
aaactcaaaggacctggcggtgcttcatatccctctagaggagcctgttctgtaatcgataaaccccgatcaacctcaccacctcttgctcagcctatataccgccatcttcagcaaacc

SEQ ID NO: 78934 - DNA, 120 bp, Homo sapiens
  misc_feature: 553 for SV(C|O) and mtDNA
agtggctcctttaacctctccacccttatcacaacacaagaacacctctgattactcctgccatcatgacccttggccataatatgatttatctccacactagcagagaccaaccgaacc

SEQ ID NO: 78935 - DNA, 120 bp, Homo sapiens
  misc_feature: 553 for SV(C|O) and mtDNA
aacatctcagacgctcaggaaatagaaaccgtctgaactatcctgcccgccatcatcctagtcctcatcgccctcccatccctgcgcatcctttacataacagacgaggtcaacgatccc

SEQ ID NO: 78936 - DNA, 120 bp, Homo sapiens
  misc_feature: 553 for SV(C|O) and mtDNA
ggagtagaaacctgtgaggaaaggtattcctgctaatgctaggctgccaatggtgagggaggttgaagtgagaggtatggttttgagtagtcctcctatttttcggatatcttgttcatt

SEQ ID NO: 78937 - DNA, 120 bp, Homo sapiens
  misc_feature: 553 for SV(C|O) and mtDNA
aaagtttaactaagctatactaaccccagggttggtcaatttcgtgccagccaccgcggtcacacgattaacccaagtcaatagaagccggcgtaaagagtgttttagatcaccccctcc

SEQ ID NO: 78938 - DNA, 120 bp, Homo sapiens
  misc_feature: 553 for SV(C|O) and mtDNA
gcttgcaactatagcaacagccttcataggctatgtcctcccgtgaggccaaatatcattctgaggggccacagtaattacaaacttactatccgccatcccatacattgggacagacct

SEQ ID NO: 78939 - DNA, 120 bp, Homo sapiens
  misc_feature: 553 for SV(C|O) and mtDNA
gcaaagactagtatggcaataggcacaatattggctaagagggagtgggtgttgagggttatgagagtagctataatgaacagtgatagtattattccttctaggcatagtagggaggat

SEQ ID NO: 78940 - DNA, 120 bp, Homo sapiens
  misc_feature: 553 for SV(C|O) and mtDNA
ctaacactcacaacaaaactaactaatactaacatctcagacgctcaggaaatagaaaccgtctgaactatcctgcccgccatcatcctagtcctcatcgccctcccatccctgcgcatc

SEQ ID NO: 78941 - DNA, 120 bp, Homo sapiens
  misc_feature: 553 for SV(C|O) and mtDNA
gagttggtcgtagcggaatcgggggtatgctgttcgaattcataagaacagggaggttagaagtagggtcttggtgacaaaatatgttgtgtagagttcaggggagagtgcgtcatatgt

SEQ ID NO: 78942 - DNA, 120 bp, Homo sapiens
  misc_feature: 553 for SV(C|O) and mtDNA
gaaagtttaactaagctatactaaccccagggttggtcaatttcgtgccagccaccgcggtcacacgattaacccaagtcaatagaagccggcgtaaagagtgttttagatcaccccctc

SEQ ID NO: 78943 - DNA, 120 bp, Homo sapiens
  misc_feature: 553 for SV(C|O) and mtDNA
ctaactaatactaacatctcagacgctcaggaaatagaaaccgtctgaactatcctgcccgccatcatcctagtcctcatcgccctcccatccctgcgcatcctttacataacagacgag

SEQ ID NO: 78944 - DNA, 120 bp, Homo sapiens; identical to SEQ ID NO: 61407
  misc_feature: 553 for SV(C|O) and mtDNA

SEQ ID NO: 78945 - DNA, 120 bp, Homo sapiens
  misc_feature: 553 for SV(C|O) and mtDNA
atgatggacccggagcacataaatagtatggctttgaagaaggcgtgggtacagatgtgcaggaatgctaggtgtggttggttgatgccgattgtaactattatgagtcctagttgactt

SEQ ID NO: 78946 - DNA, 120 bp, Homo sapiens; identical to SEQ ID NO: 61338
  misc_feature: 553 for SV(C|O) and mtDNA

SEQ ID NO: 78947 - DNA, 120 bp, Homo sapiens
  misc_feature: 553 for SV(C|O) and mtDNA
acactcacaacaaaactaactaatactaacatctcagacgctcaggaaatagaaaccgtctgaactatcctgcccgccatcatcctagtcctcatcgccctcccatccctgcgcatcctt

SEQ ID NO: 78948 - DNA, 120 bp, Homo sapiens
  misc_feature: 552 for SV(C|O) and mtDNA
tttttcggtcaccctgaagtttatattcttatcctaccaggcttcggaataatctcccatattgtaacttactactccggaaaaaaagaaccatttggatacataggtatggtctgagct

SEQ ID NO: 78949 - DNA, 120 bp, Homo sapiens
  misc_feature: 552 for SV(C|O) and mtDNA
tttcctaacactcacaacaaaactaactaatactaacatctcagacgctcaggaaatagaaaccgtctgaactatcctgcccgccatcatcctagtcctcatcgccctcccatccctgcg

SEQ ID NO: 78950 - DNA, 120 bp, Homo sapiens; identical to SEQ ID NO: 56212
  misc_feature: 552 for SV(C|O) and mtDNA

SEQ ID NO: 78951 - DNA, 120 bp, Homo sapiens; identical to SEQ ID NO: 58977
  misc_feature: 552 for SV(C|O) and mtDNA

SEQ ID NO: 78952 - DNA, 120 bp, Homo sapiens
  misc_feature: 552 for SV(C|O) and mtDNA
actagtcacagccctatactccctctacatatttaccacaacacaatggggctcactcacccaccacattaacaacataaaaccctcattcacacgagaaaacaccctcatgttcataca

SEQ ID NO: 78953 - DNA, 120 bp, Homo sapiens
  misc_feature: 552 for SV(C|O) and mtDNA
tgggggcaatgaatgaagcgaacagattttcgttcattttggttctcagggtttgttataattttttatttttatgggctttggtgagggaggtaggtggtagtttgtgtttaatatttt

SEQ ID NO: 78954 - DNA, 120 bp, Homo sapiens
  misc_feature: 552 for SV(C|O) and mtDNA
cagccataatttacgtctcgagtgatgtgggcgattgatgaaaaggcggttgaggcgtctggtgagtagtgcatggctaggaatagtcctgtggtgatttggaggatcaggcaggcgcca

SEQ ID NO: 78955 - DNA, 120 bp, Homo sapiens
  misc_feature: 552 for SV(C|O) and mtDNA
gtcaacctcaacctaggcctcctatttattctagccacctctagcctagccgtttactcaatcctctgatcagggtgagcatcaaactcaaactacgccctgatcggcgcactgcgagca

SEQ ID NO: 78956 - DNA, 120 bp, Homo sapiens; identical to SEQ ID NO: 63041
  misc_feature: 552 for SV(C|O) and mtDNA

SEQ ID NO: 78957 - DNA, 120 bp, Homo sapiens
  misc_feature: 552 for SV(C|O) and mtDNA
gaagaataaggcgaaggggcctgcggcgtattcgatgttgaagcctgagactagttcggactctccttcggcaaggtcgaagggggttcggttggtctctgctagtgtggagataaatca

SEQ ID NO: 78958 - DNA, 120 bp, Homo sapiens
  misc_feature: 552 for SV(C|O) and mtDNA
ctaatactaacatctcagacgctcaggaaatagaaaccgtctgaactatcctgcccgccatcatcctagtcctcatcgccctcccatccctgcgcatcctttacataacagacgaggtca

SEQ ID NO: 78959 - DNA, 120 bp, Homo sapiens
  misc_feature: 552 for SV(C|O) and mtDNA
cctagtcctcatcgccctcccatccctgcgcatcctttacataacagacgaggtcaacgatccctcccttaccatcaaatcaattggccaccaatggtactgaacctacgagtacaccga

SEQ ID NO: 78960 - DNA, 120 bp, Homo sapiens
  misc_feature: 552 for SV(C|O) and mtDNA
tatcatagctcagaccatacctatgtatccaaatggttctttttttccggagtagtaagttacaatatgggagattattccgaagcctggtaggataagaatataaacttcagggtgacc

SEQ ID NO: 78961 - DNA, 120 bp, Homo sapiens
  misc_feature: 552 for SV(C|O) and mtDNA
tagtcctcatcgccctcccatccctgcgcatcctttacataacagacgaggtcaacgatccctcccttaccatcaaatcaattggccaccaatggtactgaacctacgagtacaccgact

SEQ ID NO: 78962 - DNA, 120 bp, Homo sapiens
  misc_feature: 552 for SV(C|O) and mtDNA
ctggcggtgcttcatatccctctagaggagcctgttctgtaatcgataaaccccgatcaacctcaccacctcttgctcagcctatataccgccatcttcagcaaaccctgatgaaggcta

SEQ ID NO: 78963 - DNA, 120 bp, Homo sapiens
  misc_feature: 552 for SV(C|O) and mtDNA
tactatcactgttcattatagctactctcataaccctcaacacccactccctcttagccaatattgtgcctattgccatactagtctttgccgcctgcgaagcagcggtgggcctagccc

SEQ ID NO: 78964 - DNA, 120 bp, Homo sapiens
  misc_feature: 552 for SV(C|O) and mtDNA
aatgctaggtgtggttggttgatgccgattgtaactattatgagtcctagttgacttgaagtggagaaggctacgatttttttgatgtcattttgtgtaagggcgcagactgctgcgaac

SEQ ID NO: 78965 - DNA, 120 bp, Homo sapiens
  misc_feature: 552 for SV(C|O) and mtDNA
gtggtggccttggtatgtgctttctcgtgttacatcgcgccatcattggtatatggttagtgtgttggttagtaggcctagtatgaggagcgttatggagtggaagtgaaatcacatggc

SEQ ID NO: 78966 - DNA, 120 bp, Homo sapiens
  misc_feature: 552 for SV(C|O) and mtDNA
ctagtcctcatcgccctcccatccctgcgcatcctttacataacagacgaggtcaacgatccctcccttaccatcaaatcaattggccaccaatggtactgaacctacgagtacaccgac

SEQ ID NO: 78967 - DNA, 120 bp, Homo sapiens
  misc_feature: 552 for SV(C|O) and mtDNA
gcttcgaccctatatcccccgcccgcgtccctttctccataaaattcttcttagtagctattaccttcttattatttgatctagaaattgccctccttttacccctaccatgagccctac

SEQ ID NO: 78968 - DNA, 120 bp, Homo sapiens
  misc_feature: 552 for SV(C|O) and mtDNA
aacaatgaacaagatatccgaaaaataggaggactactcaaaaccatacctctcacttcaacctccctcaccattggcagcctagcattagcaggaatacctttcctcacaggtttctac

SEQ ID NO: 78969 - DNA, 120 bp, Homo sapiens
  misc_feature: 552 for SV(C|O) and mtDNA
aatcaaagacgccctcggcttacttctcttccttctctccttaatgacattaacactattctcaccagacctcctaggcgacccagacaattataccctagccaaccccttaaacacccc

SEQ ID NO: 78970 - DNA, 120 bp, Homo sapiens
  misc_feature: 552 for SV(C|O) and mtDNA
aaagacgccctcggcttacttctcttccttctctccttaatgacattaacactattctcaccagacctcctaggcgacccagacaattataccctagccaaccccttaaacacccctccc

SEQ ID NO: 78971 - DNA, 120 bp, Homo sapiens
  misc_feature: 552 for SV(C|O) and mtDNA
caacaatatactctccggacaatgaaccataaccaatactaccaatcaatactcatcattaataatcataatggctatagcaataaaactaggaatagccccctttcacttctgggtccc

SEQ ID NO: 78972 - DNA, 120 bp, Homo sapiens; identical to SEQ ID NO: 61705
  misc_feature: 552 for SV(C|O) and mtDNA

SEQ ID NO: 78973 - DNA, 120 bp, Homo sapiens; identical to SEQ ID NO: 61483
  misc_feature: 552 for SV(C|O) and mtDNA

SEQ ID NO: 78974 - DNA, 120 bp, Homo sapiens
  misc_feature: 552 for SV(C|O) and mtDNA
gctattttctgctagggggtggaagcggatgagtaagaagattcctgctacaactatagtgcttgagtggagtagggctgagactggggtggggccttctatggctgaggggagtcaggg

SEQ ID NO: 78975 - DNA, 120 bp, Homo sapiens
  misc_feature: 552 for SV(C|O) and mtDNA
gacctggcggtgcttcatatccctctagaggagcctgttctgtaatcgataaaccccgatcaacctcaccacctcttgctcagcctatataccgccatcttcagcaaaccctgatgaagg

SEQ ID NO: 78976 - DNA, 120 bp, Homo sapiens
  misc_feature: 552 for SV(C|O) and mtDNA
cgtgtagtacgatgtctagtgatgagtttgctaatacaatgccagtcaggccgcctacggtgaaaagaaagatgaatcctagggctcagagcactgcagcagatcatttcatattgcttc

SEQ ID NO: 78977 - DNA, 120 bp, Homo sapiens
  misc_feature: 552 for SV(C|O) and mtDNA
ctctctcctactcctgctcgcatctgctatagtggaggccggagcaggaacaggttgaacagtctaccctcccttagcagggaactactcccaccctggagcctccgtagacctaaccat

SEQ ID NO: 78978 - DNA, 120 bp, Homo sapiens
  misc_feature: 552 for SV(C|O) and mtDNA
ccttttcctaacactcacaacaaaactaactaatactaacatctcagacgctcaggaaatagaaaccgtctgaactatcctgcccgccatcatcctagtcctcatcgccctcccatccct

SEQ ID NO: 78979 - DNA, 120 bp, Homo sapiens
  misc_feature: 552 for SV(C|O) and mtDNA
cctggcggtgcttcatatccctctagaggagcctgttctgtaatcgataaaccccgatcaacctcaccacctcttgctcagcctatataccgccatcttcagcaaaccctgatgaaggct

SEQ ID NO: 78980 - DNA, 120 bp, Homo sapiens
  misc_feature: 552 for SV(C|O) and mtDNA
cctaacactcacaacaaaactaactaatactaacatctcagacgctcaggaaatagaaaccgtctgaactatcctgcccgccatcatcctagtcctcatcgccctcccatccctgcgcat

SEQ ID NO: 78981 - DNA, 120 bp, Homo sapiens
  misc_feature: 552 for SV(C|O) and mtDNA
catggagagctcccgtgagtggttaatagggtgatagacctgtgatccatcgtgatgtcttatttaaggggaacgtgtgggctatttaggctttatggccctgaagtaggaaccagatgt

SEQ ID NO: 78982 - DNA, 120 bp, Homo sapiens
  misc_feature: 552 for SV(C|O) and mtDNA
agctgttacagaaattaagtattgcaacttactgagggctttgaaggctcttggtctgtatttaacctaaatttctataagattattagtataaaaggggagataggtaggagtagcgtg

SEQ ID NO: 78983 - DNA, 120 bp, Homo sapiens
  misc_feature: 552 for SV(C|O) and mtDNA
aagcatagtgttagagtttggattagtgggctattttctgctagggggtggaagcggatgagtaagaagattcctgctacaactatagtgcttgagtggagtagggctgagactggggtg

SEQ ID NO: 78984 - DNA, 120 bp, Homo sapiens
  misc_feature: 552 for SV(C|O) and mtDNA
agtagagtttgaagtccttgagagaggattatgatgcgactgtgagtgcgttcgtagtttgagtttgctaggcagaatagtaatgaggatgtaagtccgtgggcgattatgagaatgact

SEQ ID NO: 78985 - DNA, 120 bp, Homo sapiens
  misc_feature: 552 for SV(C|O) and mtDNA
actcaaaggacctggcggtgcttcatatccctctagaggagcctgttctgtaatcgataaaccccgatcaacctcaccacctcttgctcagcctatataccgccatcttcagcaaaccct

SEQ ID NO: 78986 - DNA, 120 bp, Homo sapiens
  misc_feature: 552 for SV(C|O) and mtDNA
acatctcagacgctcaggaaatagaaaccgtctgaactatcctgcccgccatcatcctagtcctcatcgccctcccatccctgcgcatcctttacataacagacgaggtcaacgatccct

SEQ ID NO: 78987 - DNA, 120 bp, Homo sapiens; identical to SEQ ID NO: 54163
  misc_feature: 551 for SV(C|O) and mtDNA

SEQ ID NO: 78988 - DNA, 120 bp, Homo sapiens
  misc_feature: 551 for SV(C|O) and mtDNA
ttgcacgaaacgggatcaaacaaccccctaggaatcacctcccattccgataaaatcaccttccacccttactacacaatcaaagacgccctcggcttacttctcttccttctctcctta

SEQ ID NO: 78989 - DNA, 120 bp, Homo sapiens
  misc_feature: 551 for SV(C|O) and mtDNA
ttactagcacagagagttctcccagtaggttaatagtggggggtaaggcgaggttagcgaggcttgctagaagtcatcaaaaagctattagtgggagtagagtttgaagtccttgagaga

SEQ ID NO: 78990 - DNA, 120 bp, Homo sapiens; identical to SEQ ID NO: 57775
  misc_feature: 551 for SV(C|O) and mtDNA

SEQ ID NO: 78991 - DNA, 120 bp, Homo sapiens
  misc_feature: 551 for SV(C|O) and mtDNA
ctcgcagtgcgccgatcagggcgtagtttgagtttgatgctcaccctgatcagaggattgagtaaacggctaggctagaggtggctagaataaataggaggcctaggttgaggttgacca

SEQ ID NO: 78992 - DNA, 120 bp, Homo sapiens; identical to SEQ ID NO: 61415
  misc_feature: 551 for SV(C|O) and mtDNA

SEQ ID NO: 78993 - DNA, 120 bp, Homo sapiens
  misc_feature: 551 for SV(C|O) and mtDNA
tggcgagtcagctaaatactttgacgccggtggggatagcgatgattatggtagcggaggtgaaatatgctcgtgtgtctacgtctattcctactgtaaatatatggtgtgctcacacga

SEQ ID NO: 78994 - DNA, 120 bp, Homo sapiens
  misc_feature: 551 for SV(C|O) and mtDNA
tggacccggagcacataaatagtatggctttgaagaaggcgtgggtacagatgtgcaggaatgctaggtgtggttggttgatgccgattgtaactattatgagtcctagttgacttgaag

SEQ ID NO: 78995 - DNA, 120 bp, Homo sapiens
  misc_feature: 551 for SV(C|O) and mtDNA
tgcgagcttagcgctgtgatgagtgtgcctgcaaagatggtagagtagatgacgggttgggccaggggattaattagtacgggaagggtataaccaacattttcggggtatgggcccgat

SEQ ID NO: 78996 - DNA, 120 bp, Homo sapiens; identical to SEQ ID NO: 62981
  misc_feature: 551 for SV(C|O) and mtDNA

SEQ ID NO: 78997 - DNA, 120 bp, Homo sapiens; identical to SEQ ID NO: 56100
  misc_feature: 551 for SV(C|O) and mtDNA

SEQ ID NO: 78998 - DNA, 120 bp, Homo sapiens
  misc_feature: 551 for SV(C|O) and mtDNA
accacccacagcctaattattagcatcatccctctactattttttaaccaaatcaacaacaacctatttagctgttccccaaccttttcctccgaccccctaacaacccccctcctaata

SEQ ID NO: 78999 - DNA, 120 bp, Homo sapiens
  misc_feature: 551 for SV(C|O) and mtDNA
ccgctgcttcgcaggcggcaaagactagtatggcaataggcacaatattggctaagagggagtgggtgttgagggttatgagagtagctataatgaacagtgatagtattattccttcta

SEQ ID NO: 79000 - DNA, 120 bp, Homo sapiens; identical to SEQ ID NO: 61759
  misc_feature: 551 for SV(C|O) and mtDNA

SEQ ID NO: 79001 - DNA, 120 bp, Homo sapiens
  misc_feature: 551 for SV(C|O) and mtDNA
aacaaaactaactaatactaacatctcagacgctcaggaaatagaaaccgtctgaactatcctgcccgccatcatcctagtcctcatcgccctcccatccctgcgcatcctttacataac

SEQ ID NO: 79002 - DNA, 120 bp, Homo sapiens; identical to SEQ ID NO: 60758
  misc_feature: 551 for SV(C|O) and mtDNA

SEQ ID NO: 79003 - DNA, 120 bp, Homo sapiens
  misc_feature: 551 for SV(C|O) and mtDNA
ggctcctttaacctctccacccttatcacaacacaagaacacctctgattactcctgccatcatgacccttggccataatatgatttatctccacactagcagagaccaaccgaaccccc

SEQ ID NO: 79004 - DNA, 120 bp, Homo sapiens
  misc_feature: 551 for SV(C|O) and mtDNA
agccctatactccctctacatatttaccacaacacaatggggctcactcacccaccacattaacaacataaaaccctcattcacacgagaaaacaccctcatgttcatacacctatcccc

SEQ ID NO: 79005 - DNA, 120 bp, Homo sapiens
  misc_feature: 551 for SV(C|O) and mtDNA
ggctattttctgctagggggtggaagcggatgagtaagaagattcctgctacaactatagtgcttgagtggagtagggctgagactggggtggggccttctatggctgaggggagtcagg

SEQ ID NO: 79006 - DNA, 120 bp, Homo sapiens; identical to SEQ ID NO: 56495
  misc_feature: 551 for SV(C|O) and mtDNA

SEQ ID NO: 79007 - DNA, 120 bp, Homo sapiens; identical to SEQ ID NO: 58426
  misc_feature: 551 for SV(C|O) and mtDNA

SEQ ID NO: 79008 - DNA, 120 bp, Homo sapiens
  misc_feature: 551 for SV(C|O) and mtDNA
accctccttaacctctacttctacctacgcctaatctactccacctcaatcacactactccccatatctaacaacgtaaaaataaaatgacagtttgaacatacaaaacccaccccattc

SEQ ID NO: 79009 - DNA, 120 bp, Homo sapiens
  misc_feature: 551 for SV(C|O) and mtDNA
cttaacaatgaacaagatatccgaaaaataggaggactactcaaaaccatacctctcacttcaacctccctcaccattggcagcctagcattagcaggaatacctttcctcacaggtttc

SEQ ID NO: 79010 - DNA, 120 bp, Homo sapiens
  misc_feature: 551 for SV(C|O) and mtDNA
cctctccctaggaggcctgcccccgctaaccggctttttgcccaaatgggccattatcgaagaattcacaaaaaacaatagcctcatcatccccaccatcatagccaccatcaccctcct

SEQ ID NO: 79011 - DNA, 120 bp, Homo sapiens; identical to SEQ ID NO: 60992
  misc_feature: 551 for SV(C|O) and mtDNA

SEQ ID NO: 79012 - DNA, 120 bp, Homo sapiens
  misc_feature: 551 for SV(C|O) and mtDNA
cacaacaaaactaactaatactaacatctcagacgctcaggaaatagaaaccgtctgaactatcctgcccgccatcatcctagtcctcatcgccctcccatccctgcgcatcctttacat

SEQ ID NO: 79013 - DNA, 120 bp, Homo sapiens; identical to SEQ ID NO: 61875
  misc_feature: 551 for SV(C|O) and mtDNA

SEQ ID NO: 79014 - DNA, 120 bp, Homo sapiens
  misc_feature: 551 for SV(C|O) and mtDNA
accacctgtccaaaaaggccttcgatacgggataatcctatttattacctcagaagtttttttcttcgcaggatttttctgagccttttaccactccagcctagcccctaccccccaatt

SEQ ID NO: 79015 - DNA, 120 bp, Homo sapiens
  misc_feature: 550 for SV(C|O) and mtDNA
cctgagccctatctattactctcatcgctacctccctgacaagcgcctatagcactcgaataattcttctcaccctaacaggtcaacctcgcttccccacccttactaacattaacgaaa

SEQ ID NO: 79016 - DNA, 120 bp, Homo sapiens
  misc_feature: 550 for SV(C|O) and mtDNA
gcatcaaccaaccacacctagcattcctgcacatctgtacccacgccttcttcaaagccatactatttatgtgctccgggtccatcatccacaaccttaacaatgaacaagatatccgaa

SEQ ID NO: 79017 - DNA, 120 bp, Homo sapiens
  misc_feature: 550 for SV(C|O) and mtDNA
ttacaatcggcatcaaccaaccacacctagcattcctgcacatctgtacccacgccttcttcaaagccatactatttatgtgctccgggtccatcatccacaaccttaacaatgaacaag

SEQ ID NO: 79018 - DNA, 120 bp, Homo sapiens
  misc_feature: 550 for SV(C|O) and mtDNA
tggaaggtgattttatcggaatgggaggtgattcctagggggttgtttgatcccgtttcgtgcaagaataggaggtggagtgctgctagggctgcaataatgaagggcaagatgaagtga

SEQ ID NO: 79019 - DNA, 120 bp, Homo sapiens; identical to SEQ ID NO: 63231
  misc_feature: 550 for SV(C|O) and mtDNA

SEQ ID NO: 79020 - DNA, 120 bp, Homo sapiens
  misc_feature: 550 for SV(C|O) and mtDNA
cgtgagtggttaatagggtgatagacctgtgatccatcgtgatgtcttatttaaggggaacgtgtgggctatttaggctttatggccctgaagtaggaaccagatgtcggatacagttca

SEQ ID NO: 79021 - DNA, 120 bp, Homo sapiens
  misc_feature: 550 for SV(C|O) and mtDNA
agatgcaattcccggacgtctaaaccaaaccactttcaccgctacacgaccgggggtatactacggtcaatgctctgaaatctgtggagcaaaccacagtttcatgcccatcgtcctaga

SEQ ID NO: 79022 - DNA, 120 bp, Homo sapiens
  misc_feature: 550 for SV(C|O) and mtDNA
tcaaaggacctggcggtgcttcatatccctctagaggagcctgttctgtaatcgataaaccccgatcaacctcaccacctcttgctcagcctatataccgccatcttcagcaaaccctga

SEQ ID NO: 79023 - DNA, 120 bp, Homo sapiens
  misc_feature: 550 for SV(C|O) and mtDNA
tcaaaaagctattagtgggagtagagtttgaagtccttgagagaggattatgatgcgactgtgagtgcgttcgtagtttgagtttgctaggcagaatagtaatgaggatgtaagtccgtg

SEQ ID NO: 79024 - DNA, 120 bp, Homo sapiens
  misc_feature: 550 for SV(C|O) and mtDNA
acaacaaaactaactaatactaacatctcagacgctcaggaaatagaaaccgtctgaactatcctgcccgccatcatcctagtcctcatcgccctcccatccctgcgcatcctttacata

SEQ ID NO: 79025 - DNA, 120 bp, Homo sapiens
  misc_feature: 550 for SV(C|O) and mtDNA
gtgtagtacgatgtctagtgatgagtttgctaatacaatgccagtcaggccgcctacggtgaaaagaaagatgaatcctagggctcagagcactgcagcagatcatttcatattgcttcc

SEQ ID NO: 79026 - DNA, 120 bp, Homo sapiens; identical to SEQ ID NO: 62752
  misc_feature: 550 for SV(C|O) and mtDNA

SEQ ID NO: 79027 - DNA, 120 bp, Homo sapiens; identical to SEQ ID NO: 62200
  misc_feature: 550 for SV(C|O) and mtDNA

SEQ ID NO: 79028 - DNA, 120 bp, Homo sapiens
  misc_feature: 550 for SV(C|O) and mtDNA
atatcatagctcagaccatacctatgtatccaaatggttctttttttccggagtagtaagttacaatatgggagattattccgaagcctggtaggataagaatataaacttcagggtgac

SEQ ID NO: 79029 - DNA, 120 bp, Homo sapiens
  misc_feature: 550 for SV(C|O) and mtDNA
gtactgtttgcattaataaattaaagctccatagggtcttctcgtcttgctgtgtcatgcccgcctcttcacgggcaggtcaatttcactggttaaaagtaagagacagctgaaccctcg

SEQ ID NO: 79030 - DNA, 120 bp, Homo sapiens
  misc_feature: 550 for SV(C|O) and mtDNA
cccttttcctaacactcacaacaaaactaactaatactaacatctcagacgctcaggaaatagaaaccgtctgaactatcctgcccgccatcatcctagtcctcatcgccctcccatccc

SEQ ID NO: 79031 - DNA, 120 bp, Homo sapiens; identical to SEQ ID NO: 62379
  misc_feature: 550 for SV(C|O) and mtDNA

SEQ ID NO: 79032 - DNA, 120 bp, Homo sapiens
  misc_feature: 550 for SV(C|O) and mtDNA
gctgttacagaaattaagtattgcaacttactgagggctttgaaggctcttggtctgtatttaacctaaatttctataagattattagtataaaaggggagataggtaggagtagcgtgg

SEQ ID NO: 79033 - DNA, 120 bp, Homo sapiens
  misc_feature: 550 for SV(C|O) and mtDNA
gagtagaaacctgtgaggaaaggtattcctgctaatgctaggctgccaatggtgagggaggttgaagtgagaggtatggttttgagtagtcctcctatttttcggatatcttgttcattg

SEQ ID NO: 79034 - DNA, 120 bp, Homo sapiens
  misc_feature: 550 for SV(C|O) and mtDNA
caccgctgcttcgcaggcggcaaagactagtatggcaataggcacaatattggctaagagggagtgggtgttgagggttatgagagtagctataatgaacagtgatagtattattccttc

SEQ ID NO: 79035 - DNA, 120 bp, Homo sapiens
  misc_feature: 550 for SV(C|O) and mtDNA
ctactgctcgcagtgcgccgatcagggcgtagtttgagtttgatgctcaccctgatcagaggattgagtaaacggctaggctagaggtggctagaataaataggaggcctaggttgaggt

SEQ ID NO: 79036 - DNA, 120 bp, Homo sapiens
  misc_feature: 550 for SV(C|O) and mtDNA
cacctgtccaaaaaggccttcgatacgggataatcctatttattacctcagaagtttttttcttcgcaggatttttctgagccttttaccactccagcctagcccctaccccccaattag

SEQ ID NO: 79037 - DNA, 120 bp, Homo sapiens
  misc_feature: 550 for SV(C|O) and mtDNA
ccataatttacgtctcgagtgatgtgggcgattgatgaaaaggcggttgaggcgtctggtgagtagtgcatggctaggaatagtcctgtggtgatttggaggatcaggcaggcgccaagg

SEQ ID NO: 79038 - DNA, 120 bp, Homo sapiens
  misc_feature: 550 for SV(C|O) and mtDNA
agcatagtgttagagtttggattagtgggctattttctgctagggggtggaagcggatgagtaagaagattcctgctacaactatagtgcttgagtggagtagggctgagactggggtgg

SEQ ID NO: 79039 - DNA, 120 bp, Homo sapiens
  misc_feature: 550 for SV(C|O) and mtDNA
cagctaaatactttgacgccggtggggatagcgatgattatggtagcggaggtgaaatatgctcgtgtgtctacgtctattcctactgtaaatatatggtgtgctcacacgataaaccct

SEQ ID NO: 79040 - DNA, 120 bp, Homo sapiens
  misc_feature: 550 for SV(C|O) and mtDNA
aggggggttgttagggggtcggaggaaaaggttggggaacagctaaataggttgttgttgatttggttaaaaaatagtagagggatgatgctaataattaggctgtgggtggttgtgttg

SEQ ID NO: 79041 - DNA, 120 bp, Homo sapiens; identical to SEQ ID NO: 53910
  misc_feature: 550 for SV(C|O) and mtDNA

SEQ ID NO: 79042 - DNA, 120 bp, Homo sapiens
  misc_feature: 550 for SV(C|O) and mtDNA
agtttaattatgcctttttgggttgaggtgatgatggaggtggagatttggtgctgtgaaattgttttaggtaatagcttttctagtcaggttaggtctaggaggagtaggggcaggttt

SEQ ID NO: 79043 - DNA, 120 bp, Homo sapiens; identical to SEQ ID NO: 62077
  misc_feature: 550 for SV(C|O) and mtDNA

SEQ ID NO: 79044 - DNA, 120 bp, Homo sapiens
  misc_feature: 549 for SV(C|O) and mtDNA
ttttcctaacactcacaacaaaactaactaatactaacatctcagacgctcaggaaatagaaaccgtctgaactatcctgcccgccatcatcctagtcctcatcgccctcccatccctgc

SEQ ID NO: 79045 - DNA, 120 bp, Homo sapiens; identical to SEQ ID NO: 63216
  misc_feature: 549 for SV(C|O) and mtDNA

SEQ ID NO: 79046 - DNA, 120 bp, Homo sapiens; identical to SEQ ID NO: 54433
  misc_feature: 549 for SV(C|O) and mtDNA

SEQ ID NO: 79047 - DNA, 120 bp, Homo sapiens
  misc_feature: 549 for SV(C|O) and mtDNA
acaaaactaactaatactaacatctcagacgctcaggaaatagaaaccgtctgaactatcctgcccgccatcatcctagtcctcatcgccctcccatccctgcgcatcctttacataaca

SEQ ID NO: 79048 - DNA, 120 bp, Homo sapiens
  misc_feature: 549 for SV(C|O) and mtDNA
tgcttgcaactatagcaacagccttcataggctatgtcctcccgtgaggccaaatatcattctgaggggccacagtaattacaaacttactatccgccatcccatacattgggacagacc

SEQ ID NO: 79049 - DNA, 120 bp, Homo sapiens
  misc_feature: 549 for SV(C|O) and mtDNA
tcctaacactcacaacaaaactaactaatactaacatctcagacgctcaggaaatagaaaccgtctgaactatcctgcccgccatcatcctagtcctcatcgccctcccatccctgcgca

SEQ ID NO: 79050 - DNA, 120 bp, Homo sapiens
  misc_feature: 549 for SV(C|O) and mtDNA
tgagtgcaagacgtcttgtgatgtaattattatacgaatgggggcttcaatcgggagtactactcgattgtcaacgtcaaggagtcgcaggtcgcctggttctaggaataatgggggaag

SEQ ID NO: 79051 - DNA, 120 bp, Homo sapiens
  misc_feature: 549 for SV(C|O) and mtDNA
tgagccctatctattactctcatcgctacctccctgacaagcgcctatagcactcgaataattcttctcaccctaacaggtcaacctcgcttccccacccttactaacattaacgaaaat

SEQ ID NO: 79052 - DNA, 120 bp, Homo sapiens; identical to SEQ ID NO: 60511
  misc_feature: 549 for SV(C|O) and mtDNA

SEQ ID NO: 79053 - DNA, 120 bp, Homo sapiens
  misc_feature: 549 for SV(C|O) and mtDNA
agtgggagtagagtttgaagtccttgagagaggattatgatgcgactgtgagtgcgttcgtagtttgagtttgctaggcagaatagtaatgaggatgtaagtccgtgggcgattatgaga

SEQ ID NO: 79054 - DNA, 120 bp, Homo sapiens
  misc_feature: 549 for SV(C|O) and mtDNA
tcgtgcaagaataggaggtggagtgctgctagggctgcaataatgaagggcaagatgaagtgaaaggtaaagaatcgtgtgagggtgggactgtctactgagtagcctcctcagattcat

SEQ ID NO: 79055 - DNA, 120 bp, Homo sapiens; identical to SEQ ID NO: 54921
  misc_feature: 549 for SV(C|O) and mtDNA

SEQ ID NO: 79056 - DNA, 120 bp, Homo sapiens
  misc_feature: 549 for SV(C|O) and mtDNA
tactgctcgcagtgcgccgatcagggcgtagtttgagtttgatgctcaccctgatcagaggattgagtaaacggctaggctagaggtggctagaataaataggaggcctaggttgaggtt

SEQ ID NO: 79057 - DNA, 120 bp, Homo sapiens
  misc_feature: 549 for SV(C|O) and mtDNA
tactccctctacatatttaccacaacacaatggggctcactcacccaccacattaacaacataaaaccctcattcacacgagaaaacaccctcatgttcatacacctatcccccattctc

SEQ ID NO: 79058 - DNA, 120 bp, Homo sapiens; identical to SEQ ID NO: 63218
  misc_feature: 549 for SV(C|O) and mtDNA

SEQ ID NO: 79059 - DNA, 120 bp, Homo sapiens
  misc_feature: 549 for SV(C|O) and mtDNA
ctagtcacagccctatactccctctacatatttaccacaacacaatggggctcactcacccaccacattaacaacataaaaccctcattcacacgagaaaacaccctcatgttcatacac

SEQ ID NO: 79060 - DNA, 120 bp, Homo sapiens; identical to SEQ ID NO: 61883
  misc_feature: 549 for SV(C|O) and mtDNA

SEQ ID NO: 79061 - DNA, 120 bp, Homo sapiens; identical to SEQ ID NO: 63217
  misc_feature: 549 for SV(C|O) and mtDNA

SEQ ID NO: 79062 - DNA, 120 bp, Homo sapiens; identical to SEQ ID NO: 61599
  misc_feature: 549 for SV(C|O) and mtDNA

SEQ ID NO: 79063 - DNA, 120 bp, Homo sapiens
  misc_feature: 549 for SV(C|O) and mtDNA
aaaaaggcgggagaagccccggcaggtttgaagctgcttcttcgaatttgcaattcaatatgaaaatcacctcggagctggtaaaaagaggcctaacccctgtctttagatttacagtcc

SEQ ID NO: 79064 - DNA, 120 bp, Homo sapiens
  misc_feature: 549 for SV(C|O) and mtDNA
cttttcctaacactcacaacaaaactaactaatactaacatctcagacgctcaggaaatagaaaccgtctgaactatcctgcccgccatcatcctagtcctcatcgccctcccatccctg

SEQ ID NO: 79065 - DNA, 120 bp, Homo sapiens; identical to SEQ ID NO: 57421
  misc_feature: 549 for SV(C|O) and mtDNA

SEQ ID NO: 79066 - DNA, 120 bp, Homo sapiens
  misc_feature: 549 for SV(C|O) and mtDNA
ctgatccgtcctaatcacagcagtcctacttctcctatctctcccagtcctagctgctggcatcactatactactaacagaccgcaacctcaacaccaccttcttcgaccccgccggagg

SEQ ID NO: 79067 - DNA, 120 bp, Homo sapiens
  misc_feature: 549 for SV(C|O) and mtDNA
ctcgttaaccctaacaaaaaaaactcatacccccattatgtaaaatccattgtcgcatccacctttattatcagtctcttccccacaacaatattcatgtgcctagaccaagaagttatt

SEQ ID NO: 79068 - DNA, 120 bp, Homo sapiens
  misc_feature: 549 for SV(C|O) and mtDNA
ccgaaaaataggaggactactcaaaaccatacctctcacttcaacctccctcaccattggcagcctagcattagcaggaatacctttcctcacaggtttctactccaaagaccacatcat

SEQ ID NO: 79069 - DNA, 120 bp, Homo sapiens
  misc_feature: 549 for SV(C|O) and mtDNA
agtacgatgtctagtgatgagtttgctaatacaatgccagtcaggccgcctacggtgaaaagaaagatgaatcctagggctcagagcactgcagcagatcatttcatattgcttccgtgg

SEQ ID NO: 79070 - DNA, 120 bp, Homo sapiens
  misc_feature: 549 for SV(C|O) and mtDNA
caaaggacctggcggtgcttcatatccctctagaggagcctgttctgtaatcgataaaccccgatcaacctcaccacctcttgctcagcctatataccgccatcttcagcaaaccctgat

SEQ ID NO: 79071 - DNA, 120 bp, Homo sapiens
  misc_feature: 549 for SV(C|O) and mtDNA
atgaagaataaggcgaaggggcctgcggcgtattcgatgttgaagcctgagactagttcggactctccttcggcaaggtcgaagggggttcggttggtctctgctagtgtggagataaat

SEQ ID NO: 79072 - DNA, 120 bp, Homo sapiens
  misc_feature: 549 for SV(C|O) and mtDNA
agtgggaagaagaaagagaggaagtaaagtttaattatgcctttttgggttgaggtgatgatggaggtggagatttggtgctgtgaaattgttttaggtaatagcttttctagtcaggtt

SEQ ID NO: 79073 - DNA, 120 bp, Homo sapiens
  misc_feature: 549 for SV(C|O) and mtDNA
acaatgaacaagatatccgaaaaataggaggactactcaaaaccatacctctcacttcaacctccctcaccattggcagcctagcattagcaggaatacctttcctcacaggtttctact

SEQ ID NO: 79074 - DNA, 120 bp, Homo sapiens
  misc_feature: 549 for SV(C|O) and mtDNA
aggtactgtttgcattaataaattaaagctccatagggtcttctcgtcttgctgtgtcatgcccgcctcttcacgggcaggtcaatttcactggttaaaagtaagagacagctgaaccct

SEQ ID NO: 79075 - DNA, 120 bp, Homo sapiens
  misc_feature: 549 for SV(C|O) and mtDNA
acaaacgcctgagccctatctattactctcatcgctacctccctgacaagcgcctatagcactcgaataattcttctcaccctaacaggtcaacctcgcttccccacccttactaacatt

SEQ ID NO: 79076 - DNA, 120 bp, Homo sapiens; identical to SEQ ID NO: 54184
  misc_feature: 548 for SV(C|O) and mtDNA

SEQ ID NO: 79077 - DNA, 120 bp, Homo sapiens
  misc_feature: 548 for SV(C|O) and mtDNA
tatgaagaataaggcgaaggggcctgcggcgtattcgatgttgaagcctgagactagttcggactctccttcggcaaggtcgaagggggttcggttggtctctgctagtgtggagataaa

SEQ ID NO: 79078 - DNA, 120 bp, Homo sapiens; identical to SEQ ID NO: 62983
  misc_feature: 548 for SV(C|O) and mtDNA

SEQ ID NO: 79079 - DNA, 120 bp, Homo sapiens
  misc_feature: 548 for SV(C|O) and mtDNA
atgagtgcaagacgtcttgtgatgtaattattatacgaatgggggcttcaatcgggagtactactcgattgtcaacgtcaaggagtcgcaggtcgcctggttctaggaataatgggggaa

SEQ ID NO: 79080 - DNA, 120 bp, Homo sapiens
  misc_feature: 548 for SV(C|O) and mtDNA
ttagtgggagtagagtttgaagtccttgagagaggattatgatgcgactgtgagtgcgttcgtagtttgagtttgctaggcagaatagtaatgaggatgtaagtccgtgggcgattatga

SEQ ID NO: 79081 - DNA, 120 bp, Homo sapiens
  misc_feature: 548 for SV(C|O) and mtDNA
ctccctaggaggcctgcccccgctaaccggctttttgcccaaatgggccattatcgaagaattcacaaaaaacaatagcctcatcatccccaccatcatagccaccatcaccctccttaa

SEQ ID NO: 79082 - DNA, 120 bp, Homo sapiens
  misc_feature: 548 for SV(C|O) and mtDNA
tgtggtggccttggtatgtgctttctcgtgttacatcgcgccatcattggtatatggttagtgtgttggttagtaggcctagtatgaggagcgttatggagtggaagtgaaatcacatgg

SEQ ID NO: 79083 - DNA, 120 bp, Homo sapiens
  misc_feature: 548 for SV(C|O) and mtDNA
tggtggccttggtatgtgctttctcgtgttacatcgcgccatcattggtatatggttagtgtgttggttagtaggcctagtatgaggagcgttatggagtggaagtgaaatcacatggct

SEQ ID NO: 79084 - DNA, 120 bp, Homo sapiens
  misc_feature: 548 for SV(C|O) and mtDNA
tggctcctttaacctctccacccttatcacaacacaagaacacctctgattactcctgccatcatgacccttggccataatatgatttatctccacactagcagagaccaaccgaacccc

SEQ ID NO: 79085 - DNA, 120 bp, Homo sapiens
  misc_feature: 548 for SV(C|O) and mtDNA
tattgactcacccatcaacaaccgctatgtaattcgtacattactgccagccaccatgaatattgtacggtaccataaatacttgaccacctgtagtacataaaaacccaatccacatca

SEQ ID NO: 79086 - DNA, 120 bp, Homo sapiens; identical to SEQ ID NO: 61815
  misc_feature: 548 for SV(C|O) and mtDNA

SEQ ID NO: 79087 - DNA, 120 bp, Homo sapiens
  misc_feature: 548 for SV(C|O) and mtDNA
tctccctaggaggcctgcccccgctaaccggctttttgcccaaatgggccattatcgaagaattcacaaaaaacaatagcctcatcatccccaccatcatagccaccatcaccctcctta

SEQ ID NO: 79088 - DNA, 120 bp, Homo sapiens
  misc_feature: 548 for SV(C|O) and mtDNA
gggtcttggtgacaaaatatgttgtgtagagttcaggggagagtgcgtcatatgttgttcctaggaagattgtagtggtgagggtgtttattataataatgtttgtgtattcggctatga

SEQ ID NO: 79089 - DNA, 120 bp, Homo sapiens
  misc_feature: 548 for SV(C|O) and mtDNA
tcaacctcaacctaggcctcctatttattctagccacctctagcctagccgtttactcaatcctctgatcagggtgagcatcaaactcaaactacgccctgatcggcgcactgcgagcag

SEQ ID NO: 79090 - DNA, 120 bp, Homo sapiens
  misc_feature: 548 for SV(C|O) and mtDNA
tatactccctctacatatttaccacaacacaatggggctcactcacccaccacattaacaacataaaaccctcattcacacgagaaaacaccctcatgttcatacacctatcccccattc

SEQ ID NO: 79091 - DNA, 120 bp, Homo sapiens
  misc_feature: 548 for SV(C|O) and mtDNA
tagagtttgaagtccttgagagaggattatgatgcgactgtgagtgcgttcgtagtttgagtttgctaggcagaatagtaatgaggatgtaagtccgtgggcgattatgagaatgactgc

SEQ ID NO: 79092 - DNA, 120 bp, Homo sapiens
  misc_feature: 548 for SV(C|O) and mtDNA
gtttcatgcccatcgtcctagaattaattcccctaaaaatctttgaaatagggcccgtatttaccctatagcaccccctctaccccctctagagcccactgtaaagctaacttagcatta

SEQ ID NO: 79093 - DNA, 120 bp, Homo sapiens
  misc_feature: 548 for SV(C|O) and mtDNA
actcacaacaaaactaactaatactaacatctcagacgctcaggaaatagaaaccgtctgaactatcctgcccgccatcatcctagtcctcatcgccctcccatccctgcgcatccttta

SEQ ID NO: 79094 - DNA, 120 bp, Homo sapiens
  misc_feature: 548 for SV(C|O) and mtDNA
ccacccacagcctaattattagcatcatccctctactattttttaaccaaatcaacaacaacctatttagctgttccccaaccttttcctccgaccccctaacaacccccctcctaatac

SEQ ID NO: 79095 - DNA, 120 bp, Homo sapiens; identical to SEQ ID NO: 62847
  misc_feature: 548 for SV(C|O) and mtDNA

SEQ ID NO: 79096 - DNA, 120 bp, Homo sapiens
  misc_feature: 548 for SV(C|O) and mtDNA
aagtttaactaagctatactaaccccagggttggtcaatttcgtgccagccaccgcggtcacacgattaacccaagtcaatagaagccggcgtaaagagtgttttagatcaccccctccc

SEQ ID NO: 79097 - DNA, 120 bp, Homo sapiens
  misc_feature: 548 for SV(C|O) and mtDNA
atactatcactgttcattatagctactctcataaccctcaacacccactccctcttagccaatattgtgcctattgccatactagtctttgccgcctgcgaagcagcggtgggcctagcc

SEQ ID NO: 79098 - DNA, 120 bp, Homo sapiens; identical to SEQ ID NO: 61706
  misc_feature: 548 for SV(C|O) and mtDNA

SEQ ID NO: 79099 - DNA, 120 bp, Homo sapiens
  misc_feature: 548 for SV(C|O) and mtDNA
ccccctcagataggggtcccttgaccaccatcctccgtgaaatcaatatcccgcacaagagtgctactctcctcgctccgggcccataacacttgggggtagctaaagtgaactgtatcc

SEQ ID NO: 79100 - DNA, 120 bp, Homo sapiens
  misc_feature: 548 for SV(C|O) and mtDNA
gctgcttcgcaggcggcaaagactagtatggcaataggcacaatattggctaagagggagtgggtgttgagggttatgagagtagctataatgaacagtgatagtattattccttctagg

SEQ ID NO: 79101 - DNA, 120 bp, Homo sapiens
  misc_feature: 548 for SV(C|O) and mtDNA
atggagagctcccgtgagtggttaatagggtgatagacctgtgatccatcgtgatgtcttatttaaggggaacgtgtgggctatttaggctttatggccctgaagtaggaaccagatgtc

SEQ ID NO: 79102 - DNA, 120 bp, Homo sapiens
  misc_feature: 548 for SV(C|O) and mtDNA
ctctccctaggaggcctgcccccgctaaccggctttttgcccaaatgggccattatcgaagaattcacaaaaaacaatagcctcatcatccccaccatcatagccaccatcaccctcctt

SEQ ID NO: 79103 - DNA, 120 bp, Homo sapiens
  misc_feature: 548 for SV(C|O) and mtDNA
aactaactaatactaacatctcagacgctcaggaaatagaaaccgtctgaactatcctgcccgccatcatcctagtcctcatcgccctcccatccctgcgcatcctttacataacagacg

SEQ ID NO: 79104 - DNA, 120 bp, Homo sapiens; identical to SEQ ID NO: 55205
  misc_feature: 548 for SV(C|O) and mtDNA

SEQ ID NO: 79105 - DNA, 120 bp, Homo sapiens
  misc_feature: 548 for SV(C|O) and mtDNA
cgaaagtttaactaagctatactaaccccagggttggtcaatttcgtgccagccaccgcggtcacacgattaacccaagtcaatagaagccggcgtaaagagtgttttagatcaccccct

SEQ ID NO: 79106 - DNA, 120 bp, Homo sapiens
  misc_feature: 548 for SV(C|O) and mtDNA
ccaccgctgcttcgcaggcggcaaagactagtatggcaataggcacaatattggctaagagggagtgggtgttgagggttatgagagtagctataatgaacagtgatagtattattcctt

SEQ ID NO: 79107 - DNA, 120 bp, Homo sapiens
  misc_feature: 548 for SV(C|O) and mtDNA
ataaagaatattgaggcgccattggcgtgaaggtagcggatgattcagccataatttacgtctcgagtgatgtgggcgattgatgaaaaggcggttgaggcgtctggtgagtagtgcatg

SEQ ID NO: 79108 - DNA, 120 bp, Homo sapiens; identical to SEQ ID NO: 58576
  misc_feature: 548 for SV(C|O) and mtDNA

SEQ ID NO: 79109 - DNA, 120 bp, Homo sapiens
  misc_feature: 548 for SV(C|O) and mtDNA
aagaataaggcgaaggggcctgcggcgtattcgatgttgaagcctgagactagttcggactctccttcggcaaggtcgaagggggttcggttggtctctgctagtgtggagataaatcat

SEQ ID NO: 79110 - DNA, 120 bp, Homo sapiens
  misc_feature: 548 for SV(C|O) and mtDNA
atcaaaaagctattagtgggagtagagtttgaagtccttgagagaggattatgatgcgactgtgagtgcgttcgtagtttgagtttgctaggcagaatagtaatgaggatgtaagtccgt

SEQ ID NO: 79111 - DNA, 120 bp, Homo sapiens
  misc_feature: 547 for SV(C|O) and mtDNA
ctgagccctatctattactctcatcgctacctccctgacaagcgcctatagcactcgaataattcttctcaccctaacaggtcaacctcgcttccccacccttactaacattaacgaaaa

SEQ ID NO: 79112 - DNA, 120 bp, Homo sapiens
  misc_feature: 547 for SV(C|O) and mtDNA
ttttcggtcaccctgaagtttatattcttatcctaccaggcttcggaataatctcccatattgtaacttactactccggaaaaaaagaaccatttggatacataggtatggtctgagcta

SEQ ID NO: 79113 - DNA, 120 bp, Homo sapiens; identical to SEQ ID NO: 56278
  misc_feature: 547 for SV(C|O) and mtDNA

SEQ ID NO: 79114 - DNA, 120 bp, Homo sapiens
  misc_feature: 547 for SV(C|O) and mtDNA
attgactcacccatcaacaaccgctatgtaattcgtacattactgccagccaccatgaatattgtacggtaccataaatacttgaccacctgtagtacataaaaacccaatccacatcaa

SEQ ID NO: 79115 - DNA, 120 bp, Homo sapiens; identical to SEQ ID NO: 62626
  misc_feature: 547 for SV(C|O) and mtDNA

SEQ ID NO: 79116 - DNA, 120 bp, Homo sapiens
  misc_feature: 547 for SV(C|O) and mtDNA
ttcgcaggcggcaaagactagtatggcaataggcacaatattggctaagagggagtgggtgttgagggttatgagagtagctataatgaacagtgatagtattattccttctaggcatag

SEQ ID NO: 79117 - DNA, 120 bp, Homo sapiens
  misc_feature: 547 for SV(C|O) and mtDNA
ctatgaagaataaggcgaaggggcctgcggcgtattcgatgttgaagcctgagactagttcggactctccttcggcaaggtcgaagggggttcggttggtctctgctagtgtggagataa

SEQ ID NO: 79118 - DNA, 120 bp, Homo sapiens; identical to SEQ ID NO: 58766
  misc_feature: 547 for SV(C|O) and mtDNA

SEQ ID NO: 79119 - DNA, 120 bp, Homo sapiens; identical to SEQ ID NO: 58851
  misc_feature: 547 for SV(C|O) and mtDNA

SEQ ID NO: 79120 - DNA, 120 bp, Homo sapiens
  misc_feature: 547 for SV(C|O) and mtDNA
tggggcatttcactgtaaagaggtgttggttctcttaatctttaacttaaaaggttaatgctaagttagctttacagtgggctctagagggggtagagggggtgctatagggtaaatacg

SEQ ID NO: 79121 - DNA, 120 bp, Homo sapiens
  misc_feature: 547 for SV(C|O) and mtDNA
tgcttcgcaggcggcaaagactagtatggcaataggcacaatattggctaagagggagtgggtgttgagggttatgagagtagctataatgaacagtgatagtattattccttctaggca

SEQ ID NO: 79122 - DNA, 120 bp, Homo sapiens; identical to SEQ ID NO: 61255
  misc_feature: 547 for SV(C|O) and mtDNA

SEQ ID NO: 79123 - DNA, 120 bp, Homo sapiens
  misc_feature: 547 for SV(C|O) and mtDNA
tcatgagtgcaagacgtcttgtgatgtaattattatacgaatgggggcttcaatcgggagtactactcgattgtcaacgtcaaggagtcgcaggtcgcctggttctaggaataatggggg

SEQ ID NO: 79124 - DNA, 120 bp, Homo sapiens
  misc_feature: 547 for SV(C|O) and mtDNA
aaggacctggcggtgcttcatatccctctagaggagcctgttctgtaatcgataaaccccgatcaacctcaccacctcttgctcagcctatataccgccatcttcagcaaaccctgatga

SEQ ID NO: 79125 - DNA, 120 bp, Homo sapiens; identical to SEQ ID NO: 62997
  misc_feature: 547 for SV(C|O) and mtDNA

SEQ ID NO: 79126 - DNA, 120 bp, Homo sapiens
  misc_feature: 547 for SV(C|O) and mtDNA
atactagtcacagccctatactccctctacatatttaccacaacacaatggggctcactcacccaccacattaacaacataaaaccctcattcacacgagaaaacaccctcatgttcata

SEQ ID NO: 79127 - DNA, 120 bp, Homo sapiens
  misc_feature: 547 for SV(C|O) and mtDNA
taacttcttggtctaggcacatgaatattgttgtggggaagagactgataataaaggtggatgcgacaatggattttacataatgggggtatgagttttttttgttagggttaacgaggg

SEQ ID NO: 79128 - DNA, 120 bp, Homo sapiens
  misc_feature: 547 for SV(C|O) and mtDNA
taaagtttaattatgcctttttgggttgaggtgatgatggaggtggagatttggtgctgtgaaattgttttaggtaatagcttttctagtcaggttaggtctaggaggagtaggggcagg

SEQ ID NO: 79129 - DNA, 120 bp, Homo sapiens; identical to SEQ ID NO: 58597
  misc_feature: 547 for SV(C|O) and mtDNA

SEQ ID NO: 79130 - DNA, 120 bp, Homo sapiens; identical to SEQ ID NO: 60759
  misc_feature: 547 for SV(C|O) and mtDNA

SEQ ID NO: 79131 - DNA, 120 bp, Homo sapiens
  misc_feature: 547 for SV(C|O) and mtDNA
gcccttttcctaacactcacaacaaaactaactaatactaacatctcagacgctcaggaaatagaaaccgtctgaactatcctgcccgccatcatcctagtcctcatcgccctcccatcc

SEQ ID NO: 79132 - DNA, 120 bp, Homo sapiens
  misc_feature: 547 for SV(C|O) and mtDNA
ctgcttcgcaggcggcaaagactagtatggcaataggcacaatattggctaagagggagtgggtgttgagggttatgagagtagctataatgaacagtgatagtattattccttctaggc

SEQ ID NO: 79133 - DNA, 120 bp, Homo sapiens
  misc_feature: 547 for SV(C|O) and mtDNA
ctaatagctttttgatgacttctagcaagcctcgctaacctcgccttaccccccactattaacctactgggagaactctctgtgctagtaaccacgttctcctgatcaaatatcactctc

SEQ ID NO: 79134 - DNA, 120 bp, Homo sapiens
  misc_feature: 547 for SV(C|O) and mtDNA
gaatattgaggcgccattggcgtgaaggtagcggatgattcagccataatttacgtctcgagtgatgtgggcgattgatgaaaaggcggttgaggcgtctggtgagtagtgcatggctag

SEQ ID NO: 79135 - DNA, 120 bp, Homo sapiens
  misc_feature: 547 for SV(C|O) and mtDNA
ataggctgagcaagaggtggtgaggttgatcggggtttatcgattacagaacaggctcctctagagggatatgaagcaccgccaggtcctttgagttttaagctgtggctcgtagtgttc

SEQ ID NO: 79136 - DNA, 120 bp, Homo sapiens; identical to SEQ ID NO: 63239
  misc_feature: 547 for SV(C|O) and mtDNA

SEQ ID NO: 79137 - DNA, 120 bp, Homo sapiens; identical to SEQ ID NO: 60144
  misc_feature: 547 for SV(C|O) and mtDNA

SEQ ID NO: 79138 - DNA, 120 bp, Homo sapiens; identical to SEQ ID NO: 62304
  misc_feature: 547 for SV(C|O) and mtDNA

SEQ ID NO: 79139 - DNA, 120 bp, Homo sapiens
  misc_feature: 547 for SV(C|O) and mtDNA
ccttgacgttgacaatcgagtagtactcccgattgaagcccccattcgtataataattacatcacaagacgtcttgcactcatgagctgtccccacattaggcttaaaaacagatgcaat

SEQ ID NO: 79140 - DNA, 120 bp, Homo sapiens
  misc_feature: 547 for SV(C|O) and mtDNA
ataacttcttggtctaggcacatgaatattgttgtggggaagagactgataataaaggtggatgcgacaatggattttacataatgggggtatgagttttttttgttagggttaacgagg

SEQ ID NO: 79141 - DNA, 120 bp, Homo sapiens
  misc_feature: 547 for SV(C|O) and mtDNA
caaaaagctattagtgggagtagagtttgaagtccttgagagaggattatgatgcgactgtgagtgcgttcgtagtttgagtttgctaggcagaatagtaatgaggatgtaagtccgtgg

SEQ ID NO: 79142 - DNA, 120 bp, Homo sapiens
  misc_feature: 547 for SV(C|O) and mtDNA
cataatcattttccttatctgcttcctagtcctgtatgcccttttcctaacactcacaacaaaactaactaatactaacatctcagacgctcaggaaatagaaaccgtctgaactatcct

SEQ ID NO: 79143 - DNA, 120 bp, Homo sapiens
  misc_feature: 547 for SV(C|O) and mtDNA
acttcttggtctaggcacatgaatattgttgtggggaagagactgataataaaggtggatgcgacaatggattttacataatgggggtatgagttttttttgttagggttaacgagggtg

SEQ ID NO: 79144 - DNA, 120 bp, Homo sapiens; identical to SEQ ID NO: 59130
  misc_feature: 547 for SV(C|O) and mtDNA

SEQ ID NO: 79145 - DNA, 120 bp, Homo sapiens
  misc_feature: 547 for SV(C|O) and mtDNA
atcaaagacgccctcggcttacttctcttccttctctccttaatgacattaacactattctcaccagacctcctaggcgacccagacaattataccctagccaaccccttaaacacccct

SEQ ID NO: 79146 - DNA, 120 bp, Homo sapiens; identical to SEQ ID NO: 53973
  misc_feature: 546 for SV(C|O) and mtDNA

SEQ ID NO: 79147 - DNA, 120 bp, Homo sapiens
  misc_feature: 546 for SV(C|O) and mtDNA
catcaaccaaccacacctagcattcctgcacatctgtacccacgccttcttcaaagccatactatttatgtgctccgggtccatcatccacaaccttaacaatgaacaagatatccgaaa

SEQ ID NO: 79148 - DNA, 120 bp, Homo sapiens
  misc_feature: 546 for SV(C|O) and mtDNA
agccataatttacgtctcgagtgatgtgggcgattgatgaaaaggcggttgaggcgtctggtgagtagtgcatggctaggaatagtcctgtggtgatttggaggatcaggcaggcgccaa

SEQ ID NO: 79149 - DNA, 120 bp, Homo sapiens
  misc_feature: 546 for SV(C|O) and mtDNA
ctacctaaaactcacagccctcgctgtcactttcctaggacttctaacagccctagacctcaactacctaaccaacaaacttaaaataaaatccccactatgcacattttatttctccaa

SEQ ID NO: 79150 - DNA, 120 bp, Homo sapiens; identical to SEQ ID NO: 53884
  misc_feature: 546 for SV(C|O) and mtDNA

SEQ ID NO: 79151 - DNA, 120 bp, Homo sapiens
  misc_feature: 546 for SV(C|O) and mtDNA
gcctgagccctatctattactctcatcgctacctccctgacaagcgcctatagcactcgaataattcttctcaccctaacaggtcaacctcgcttccccacccttactaacattaacgaa

SEQ ID NO: 79152 - DNA, 120 bp, Homo sapiens
  misc_feature: 546 for SV(C|O) and mtDNA
taagtggctcctttaacctctccacccttatcacaacacaagaacacctctgattactcctgccatcatgacccttggccataatatgatttatctccacactagcagagaccaaccgaa

SEQ ID NO: 79153 - DNA, 120 bp, Homo sapiens
  misc_feature: 546 for SV(C|O) and mtDNA
acgccctcataatcattttccttatctgcttcctagtcctgtatgcccttttcctaacactcacaacaaaactaactaatactaacatctcagacgctcaggaaatagaaaccgtctgaa

SEQ ID NO: 79154 - DNA, 120 bp, Homo sapiens
  misc_feature: 546 for SV(C|O) and mtDNA
agccctatctattactctcatcgctacctccctgacaagcgcctatagcactcgaataattcttctcaccctaacaggtcaacctcgcttccccacccttactaacattaacgaaaataa

SEQ ID NO: 79155 - DNA, 120 bp, Homo sapiens
  misc_feature: 546 for SV(C|O) and mtDNA
atgctaggctgccaatggtgagggaggttgaagtgagaggtatggttttgagtagtcctcctatttttcggatatcttgttcattgttaaggttgtggatgatggacccggagcacataa

SEQ ID NO: 79156 - DNA, 120 bp, Homo sapiens
  misc_feature: 546 for SV(C|O) and mtDNA
tgtttcaggtgcgagatagtagtagggtcgtggtgctggagtttaagttgagtagtaggaatgcggtagtagttaggataatataaatagttaaattaagaatggttatgttagggttgt

SEQ ID NO: 79157 - DNA, 120 bp, Homo sapiens
  misc_feature: 546 for SV(C|O) and mtDNA
aggtcggtttctatctacttcaaattcctccctgtacgaaaggacaagagaaataaggcctacttcacaaagcgccttcccccgtaaatgatatcatctcaacttagtattatacccaca

SEQ ID NO: 79158 - DNA, 120 bp, Homo sapiens
  misc_feature: 546 for SV(C|O) and mtDNA
tgcacaccccccagacgaaaataccaaatgcatggagagctcccgtgagtggttaatagggtgatagacctgtgatccatcgtgatgtcttatttaaggggaacgtgtgggctatttagg

SEQ ID NO: 79159 - DNA, 120 bp, Homo sapiens
  misc_feature: 546 for SV(C|O) and mtDNA
ataagtggctcctttaacctctccacccttatcacaacacaagaacacctctgattactcctgccatcatgacccttggccataatatgatttatctccacactagcagagaccaaccga

SEQ ID NO: 79160 - DNA, 120 bp, Homo sapiens
  misc_feature: 546 for SV(C|O) and mtDNA
ggcggcaaagactagtatggcaataggcacaatattggctaagagggagtgggtgttgagggttatgagagtagctataatgaacagtgatagtattattccttctaggcatagtaggga

SEQ ID NO: 79161 - DNA, 120 bp, Homo sapiens
  misc_feature: 546 for SV(C|O) and mtDNA
tcagctaaatactttgacgccggtggggatagcgatgattatggtagcggaggtgaaatatgctcgtgtgtctacgtctattcctactgtaaatatatggtgtgctcacacgataaaccc

SEQ ID NO: 79162 - DNA, 120 bp, Homo sapiens
  misc_feature: 546 for SV(C|O) and mtDNA
gagccctatctattactctcatcgctacctccctgacaagcgcctatagcactcgaataattcttctcaccctaacaggtcaacctcgcttccccacccttactaacattaacgaaaata

SEQ ID NO: 79163 - DNA, 120 bp, Homo sapiens
  misc_feature: 546 for SV(C|O) and mtDNA
agtcctcatcgccctcccatccctgcgcatcctttacataacagacgaggtcaacgatccctcccttaccatcaaatcaattggccaccaatggtactgaacctacgagtacaccgacta

SEQ ID NO: 79164 - DNA, 120 bp, Homo sapiens
  misc_feature: 546 for SV(C|O) and mtDNA
tagtatacccccggtcgtgtagcggtgaaagtggtttggtttagacgtccgggaattgcatctgtttttaagcctaatgtggggacagctcatgagtgcaagacgtcttgtgatgtaatt

SEQ ID NO: 79165 - DNA, 120 bp, Homo sapiens; identical to SEQ ID NO: 57967
  misc_feature: 546 for SV(C|O) and mtDNA

SEQ ID NO: 79166 - DNA, 120 bp, Homo sapiens
  misc_feature: 546 for SV(C|O) and mtDNA
cctaacaaaaaaaactcatacccccattatgtaaaatccattgtcgcatccacctttattatcagtctcttccccacaacaatattcatgtgcctagaccaagaagttattatctcgaac

SEQ ID NO: 79167 - DNA, 120 bp, Homo sapiens
  misc_feature: 546 for SV(C|O) and mtDNA
ggtactgtttgcattaataaattaaagctccatagggtcttctcgtcttgctgtgtcatgcccgcctcttcacgggcaggtcaatttcactggttaaaagtaagagacagctgaaccctc

SEQ ID NO: 79168 - DNA, 120 bp, Homo sapiens
  misc_feature: 546 for SV(C|O) and mtDNA
gggtcccagaggttacccaaggcacccctctgacatccggcctgcttcttctcacatgacaaaaactagcccccatctcaatcatataccaaatctctccctcactaaacgtaagccttc

SEQ ID NO: 79169 - DNA, 120 bp, Homo sapiens
  misc_feature: 546 for SV(C|O) and mtDNA
ggagtaatccaggtcggtttctatctacttcaaattcctccctgtacgaaaggacaagagaaataaggcctacttcacaaagcgccttcccccgtaaatgatatcatctcaacttagtat

SEQ ID NO: 79170 - DNA, 120 bp, Homo sapiens
  misc_feature: 546 for SV(C|O) and mtDNA
ggacctggcggtgcttcatatccctctagaggagcctgttctgtaatcgataaaccccgatcaacctcaccacctcttgctcagcctatataccgccatcttcagcaaaccctgatgaag

SEQ ID NO: 79171 - DNA, 120 bp, Homo sapiens
  misc_feature: 546 for SV(C|O) and mtDNA
ggacccggagcacataaatagtatggctttgaagaaggcgtgggtacagatgtgcaggaatgctaggtgtggttggttgatgccgattgtaactattatgagtcctagttgacttgaagt

SEQ ID NO: 79172 - DNA, 120 bp, Homo sapiens
  misc_feature: 546 for SV(C|O) and mtDNA
acctggcggtgcttcatatccctctagaggagcctgttctgtaatcgataaaccccgatcaacctcaccacctcttgctcagcctatataccgccatcttcagcaaaccctgatgaaggc

SEQ ID NO: 79173 - DNA, 120 bp, Homo sapiens
  misc_feature: 546 for SV(C|O) and mtDNA
gccctcataatcattttccttatctgcttcctagtcctgtatgcccttttcctaacactcacaacaaaactaactaatactaacatctcagacgctcaggaaatagaaaccgtctgaact

SEQ ID NO: 79174 - DNA, 120 bp, Homo sapiens
  misc_feature: 546 for SV(C|O) and mtDNA
gccataatttacgtctcgagtgatgtgggcgattgatgaaaaggcggttgaggcgtctggtgagtagtgcatggctaggaatagtcctgtggtgatttggaggatcaggcaggcgccaag

SEQ ID NO: 79175 - DNA, 120 bp, Homo sapiens; identical to SEQ ID NO: 57388
  misc_feature: 546 for SV(C|O) and mtDNA

SEQ ID NO: 79176 - DNA, 120 bp, Homo sapiens
  misc_feature: 546 for SV(C|O) and mtDNA
ctaatgcttaccgaacgaaaaattctaggctatatacaactacgcaaaggccccaacgttgtaggcccctacgggctactacaacccttcgctgacgccataaaactcttcaccaaagag

SEQ ID NO: 79177 - DNA, 120 bp, Homo sapiens
  misc_feature: 546 for SV(C|O) and mtDNA
agagaggaagtaaagtttaattatgcctttttgggttgaggtgatgatggaggtggagatttggtgctgtgaaattgttttaggtaatagcttttctagtcaggttaggtctaggaggag

SEQ ID NO: 79178 - DNA, 120 bp, Homo sapiens
  misc_feature: 546 for SV(C|O) and mtDNA
ctccgggtccatcatccacaaccttaacaatgaacaagatatccgaaaaataggaggactactcaaaaccatacctctcacttcaacctccctcaccattggcagcctagcattagcagg

SEQ ID NO: 79179 - DNA, 120 bp, Homo sapiens
  misc_feature: 546 for SV(C|O) and mtDNA
ctcaaaggacctggcggtgcttcatatccctctagaggagcctgttctgtaatcgataaaccccgatcaacctcaccacctcttgctcagcctatataccgccatcttcagcaaaccctg

SEQ ID NO: 79180 - DNA, 120 bp, Homo sapiens
  misc_feature: 546 for SV(C|O) and mtDNA
ctattttctgctagggggtggaagcggatgagtaagaagattcctgctacaactatagtgcttgagtggagtagggctgagactggggtggggccttctatggctgaggggagtcagggg

SEQ ID NO: 79181 - DNA, 120 bp, Homo sapiens
  misc_feature: 546 for SV(C|O) and mtDNA
cgctgcttcgcaggcggcaaagactagtatggcaataggcacaatattggctaagagggagtgggtgttgagggttatgagagtagctataatgaacagtgatagtattattccttctag

SEQ ID NO: 79182 - DNA, 120 bp, Homo sapiens
  misc_feature: 546 for SV(C|O) and mtDNA
ctactccactcaagcactatagttgtagcaggaatcttcttactcatccgcttccaccccctagcagaaaatagcccactaatccaaactctaacactatgcttaggcgctatcaccact

SEQ ID NO: 79183 - DNA, 120 bp, Homo sapiens; identical to SEQ ID NO: 63241
  misc_feature: 546 for SV(C|O) and mtDNA

SEQ ID NO: 79184 - DNA, 120 bp, Homo sapiens
  misc_feature: 546 for SV(C|O) and mtDNA
aggcggcaaagactagtatggcaataggcacaatattggctaagagggagtgggtgttgagggttatgagagtagctataatgaacagtgatagtattattccttctaggcatagtaggg

SEQ ID NO: 79185 - DNA, 120 bp, Homo sapiens
  misc_feature: 546 for SV(C|O) and mtDNA
cccgtgagtggttaatagggtgatagacctgtgatccatcgtgatgtcttatttaaggggaacgtgtgggctatttaggctttatggccctgaagtaggaaccagatgtcggatacagtt

SEQ ID NO: 79186 - DNA, 120 bp, Homo sapiens
  misc_feature: 546 for SV(C|O) and mtDNA
aggaataatactatcactgttcattatagctactctcataaccctcaacacccactccctcttagccaatattgtgcctattgccatactagtctttgccgcctgcgaagcagcggtggg

SEQ ID NO: 79187 - DNA, 120 bp, Homo sapiens
  misc_feature: 546 for SV(C|O) and mtDNA
atgtttgtgtattcggctatgaagaataaggcgaaggggcctgcggcgtattcgatgttgaagcctgagactagttcggactctccttcggcaaggtcgaagggggttcggttggtctct

SEQ ID NO: 79188 - DNA, 120 bp, Homo sapiens
  misc_feature: 546 for SV(C|O) and mtDNA
acctccctctctcctactcctgctcgcatctgctatagtggaggccggagcaggaacaggttgaacagtctaccctcccttagcagggaactactcccaccctggagcctccgtagacct

SEQ ID NO: 79189 - DNA, 120 bp, Homo sapiens
  misc_feature: 545 for SV(C|O) and mtDNA
gaatgctaggtgtggttggttgatgccgattgtaactattatgagtcctagttgacttgaagtggagaaggctacgatttttttgatgtcattttgtgtaagggcgcagactgctgcgaa

SEQ ID NO: 79190 - DNA, 120 bp, Homo sapiens
  misc_feature: 545 for SV(C|O) and mtDNA
accatacctctcacttcaacctccctcaccattggcagcctagcattagcaggaatacctttcctcacaggtttctactccaaagaccacatcatcgaaaccgcaaacatatcatacaca

SEQ ID NO: 79191 - DNA, 120 bp, Homo sapiens
  misc_feature: 545 for SV(C|O) and mtDNA
tcacaacaaaactaactaatactaacatctcagacgctcaggaaatagaaaccgtctgaactatcctgcccgccatcatcctagtcctcatcgccctcccatccctgcgcatcctttaca

SEQ ID NO: 79192 - DNA, 120 bp, Homo sapiens; identical to SEQ ID NO: 53666
  misc_feature: 545 for SV(C|O) and mtDNA

SEQ ID NO: 79193 - DNA, 120 bp, Homo sapiens; identical to SEQ ID NO: 63240
  misc_feature: 545 for SV(C|O) and mtDNA

SEQ ID NO: 79194 - DNA, 120 bp, Homo sapiens
  misc_feature: 545 for SV(C|O) and mtDNA
gatatcatagctcagaccatacctatgtatccaaatggttctttttttccggagtagtaagttacaatatgggagattattccgaagcctggtaggataagaatataaacttcagggtga

SEQ ID NO: 79195 - DNA, 120 bp, Homo sapiens; identical to SEQ ID NO: 60705
  misc_feature: 545 for SV(C|O) and mtDNA

SEQ ID NO: 79196 - DNA, 120 bp, Homo sapiens; identical to SEQ ID NO: 60637
  misc_feature: 545 for SV(C|O) and mtDNA

SEQ ID NO: 79197 - DNA, 120 bp, Homo sapiens
  misc_feature: 545 for SV(C|O) and mtDNA
cttcgcaggcggcaaagactagtatggcaataggcacaatattggctaagagggagtgggtgttgagggttatgagagtagctataatgaacagtgatagtattattccttctaggcata

SEQ ID NO: 79198 - DNA, 120 bp, Homo sapiens
  misc_feature: 545 for SV(C|O) and mtDNA
ggcttcgaccctatatcccccgcccgcgtccctttctccataaaattcttcttagtagctattaccttcttattatttgatctagaaattgccctccttttacccctaccatgagcccta

SEQ ID NO: 79199 - DNA, 120 bp, Homo sapiens; identical to SEQ ID NO: 61352
  misc_feature: 545 for SV(C|O) and mtDNA

SEQ ID NO: 79200 - DNA, 120 bp, Homo sapiens
  misc_feature: 545 for SV(C|O) and mtDNA
cggagtaatccaggtcggtttctatctacttcaaattcctccctgtacgaaaggacaagagaaataaggcctacttcacaaagcgccttcccccgtaaatgatatcatctcaacttagta

SEQ ID NO: 79201 - DNA, 120 bp, Homo sapiens
  misc_feature: 545 for SV(C|O) and mtDNA
taatgcttaccgaacgaaaaattctaggctatatacaactacgcaaaggccccaacgttgtaggcccctacgggctactacaacccttcgctgacgccataaaactcttcaccaaagagc

SEQ ID NO: 79202 - DNA, 120 bp, Homo sapiens
  misc_feature: 545 for SV(C|O) and mtDNA
taaagaatattgaggcgccattggcgtgaaggtagcggatgattcagccataatttacgtctcgagtgatgtgggcgattgatgaaaaggcggttgaggcgtctggtgagtagtgcatgg

SEQ ID NO: 79203 - DNA, 120 bp, Homo sapiens; identical to SEQ ID NO: 54732
  misc_feature: 545 for SV(C|O) and mtDNA

SEQ ID NO: 79204 - DNA, 120 bp, Homo sapiens
  misc_feature: 545 for SV(C|O) and mtDNA
gtggtgggtgagtgagccccattgtgttgtggtaaatatgtagagggagtatagggctgtgactagtatgttgagtcctgtaagtaggagagtgatatttgatcaggagaacgtggttac

SEQ ID NO: 79205 - DNA, 120 bp, Homo sapiens
  misc_feature: 545 for SV(C|O) and mtDNA
gtcctcatcgccctcccatccctgcgcatcctttacataacagacgaggtcaacgatccctcccttaccatcaaatcaattggccaccaatggtactgaacctacgagtacaccgactac

SEQ ID NO: 79206 - DNA, 120 bp, Homo sapiens
  misc_feature: 545 for SV(C|O) and mtDNA
gtaggaagttttttcataggaggtgtatgagttggtcgtagcggaatcgggggtatgctgttcgaattcataagaacagggaggttagaagtagggtcttggtgacaaaatatgttgtgt

SEQ ID NO: 79207 - DNA, 120 bp, Homo sapiens
  misc_feature: 545 for SV(C|O) and mtDNA
gaagaccctatggagctttaatttattaatgcaaacagtacctaacaaacccacaggtcctaaactaccaaacctgcattaaaaatttcggttggggcgacctcggagcagaacccaacc

SEQ ID NO: 79208 - DNA, 120 bp, Homo sapiens
  misc_feature: 545 for SV(C|O) and mtDNA
ccctatctattactctcatcgctacctccctgacaagcgcctatagcactcgaataattcttctcaccctaacaggtcaacctcgcttccccacccttactaacattaacgaaaataacc

SEQ ID NO: 79209 - DNA, 120 bp, Homo sapiens; identical to SEQ ID NO: 60519
  misc_feature: 545 for SV(C|O) and mtDNA

SEQ ID NO: 79210 - DNA, 120 bp, Homo sapiens; identical to SEQ ID NO: 62843
  misc_feature: 545 for SV(C|O) and mtDNA

SEQ ID NO: 79211 - DNA, 120 bp, Homo sapiens
  misc_feature: 545 for SV(C|O) and mtDNA
gcttcgcaggcggcaaagactagtatggcaataggcacaatattggctaagagggagtgggtgttgagggttatgagagtagctataatgaacagtgatagtattattccttctaggcat

SEQ ID NO: 79212 - DNA, 120 bp, Homo sapiens
  misc_feature: 545 for SV(C|O) and mtDNA
gctcctttaacctctccacccttatcacaacacaagaacacctctgattactcctgccatcatgacccttggccataatatgatttatctccacactagcagagaccaaccgaaccccct

SEQ ID NO: 79213 - DNA, 120 bp, Homo sapiens
  misc_feature: 545 for SV(C|O) and mtDNA
aatactatcactgttcattatagctactctcataaccctcaacacccactccctcttagccaatattgtgcctattgccatactagtctttgccgcctgcgaagcagcggtgggcctagc

SEQ ID NO: 79214 - DNA, 120 bp, Homo sapiens
  misc_feature: 545 for SV(C|O) and mtDNA
gagtttgaagtccttgagagaggattatgatgcgactgtgagtgcgttcgtagtttgagtttgctaggcagaatagtaatgaggatgtaagtccgtgggcgattatgagaatgactgcgc

SEQ ID NO: 79215 - DNA, 120 bp, Homo sapiens; identical to SEQ ID NO: 62011
  misc_feature: 545 for SV(C|O) and mtDNA

SEQ ID NO: 79216 - DNA, 120 bp, Homo sapiens
  misc_feature: 545 for SV(C|O) and mtDNA
cccccctcagataggggtcccttgaccaccatcctccgtgaaatcaatatcccgcacaagagtgctactctcctcgctccgggcccataacacttgggggtagctaaagtgaactgtatc

SEQ ID NO: 79217 - DNA, 120 bp, Homo sapiens
  misc_feature: 545 for SV(C|O) and mtDNA
gagtgggaagaagaaagagaggaagtaaagtttaattatgcctttttgggttgaggtgatgatggaggtggagatttggtgctgtgaaattgttttaggtaatagcttttctagtcaggt

SEQ ID NO: 79218 - DNA, 120 bp, Homo sapiens
  misc_feature: 545 for SV(C|O) and mtDNA
cttcttggtctaggcacatgaatattgttgtggggaagagactgataataaaggtggatgcgacaatggattttacataatgggggtatgagttttttttgttagggttaacgagggtgg

SEQ ID NO: 79219 - DNA, 120 bp, Homo sapiens
  misc_feature: 545 for SV(C|O) and mtDNA
ctccctctacatatttaccacaacacaatggggctcactcacccaccacattaacaacataaaaccctcattcacacgagaaaacaccctcatgttcatacacctatcccccattctcct

SEQ ID NO: 79220 - DNA, 120 bp, Homo sapiens; identical to SEQ ID NO: 54608
  misc_feature: 545 for SV(C|O) and mtDNA

SEQ ID NO: 79221 - DNA, 120 bp, Homo sapiens; identical to SEQ ID NO: 55919
  misc_feature: 545 for SV(C|O) and mtDNA

SEQ ID NO: 79222 - DNA, 120 bp, Homo sapiens
  misc_feature: 545 for SV(C|O) and mtDNA
cgcagtgcgccgatcagggcgtagtttgagtttgatgctcaccctgatcagaggattgagtaaacggctaggctagaggtggctagaataaataggaggcctaggttgaggttgaccagg

SEQ ID NO: 79223 - DNA, 120 bp, Homo sapiens
  misc_feature: 545 for SV(C|O) and mtDNA
cctatactccctctacatatttaccacaacacaatggggctcactcacccaccacattaacaacataaaaccctcattcacacgagaaaacaccctcatgttcatacacctatcccccat

SEQ ID NO: 79224 - DNA, 120 bp, Homo sapiens
  misc_feature: 545 for SV(C|O) and mtDNA
acctgtccaaaaaggccttcgatacgggataatcctatttattacctcagaagtttttttcttcgcaggatttttctgagccttttaccactccagcctagcccctaccccccaattagg

SEQ ID NO: 79225 - DNA, 120 bp, Homo sapiens
  misc_feature: 545 for SV(C|O) and mtDNA
ccccctggtcaacctcaacctaggcctcctatttattctagccacctctagcctagccgtttactcaatcctctgatcagggtgagcatcaaactcaaactacgccctgatcggcgcact

SEQ ID NO: 79226 - DNA, 120 bp, Homo sapiens
  misc_feature: 545 for SV(C|O) and mtDNA
ataatcattttccttatctgcttcctagtcctgtatgcccttttcctaacactcacaacaaaactaactaatactaacatctcagacgctcaggaaatagaaaccgtctgaactatcctg

SEQ ID NO: 79227 - DNA, 120 bp, Homo sapiens
  misc_feature: 545 for SV(C|O) and mtDNA
cacagcctaattattagcatcatccctctactattttttaaccaaatcaacaacaacctatttagctgttccccaaccttttcctccgaccccctaacaacccccctcctaatactaact

SEQ ID NO: 79228 - DNA, 120 bp, Homo sapiens; identical to SEQ ID NO: 62988
  misc_feature: 545 for SV(C|O) and mtDNA

SEQ ID NO: 79229 - DNA, 120 bp, Homo sapiens; identical to SEQ ID NO: 54588
  misc_feature: 545 for SV(C|O) and mtDNA

SEQ ID NO: 79230 - DNA, 120 bp, Homo sapiens
  misc_feature: 545 for SV(C|O) and mtDNA
aggcctgcccccgctaaccggctttttgcccaaatgggccattatcgaagaattcacaaaaaacaatagcctcatcatccccaccatcatagccaccatcaccctccttaacctctactt

SEQ ID NO: 79231 - DNA, 120 bp, Homo sapiens; identical to SEQ ID NO: 60682
  misc_feature: 545 for SV(C|O) and mtDNA

SEQ ID NO: 79232 - DNA, 120 bp, Homo sapiens; identical to SEQ ID NO: 59004
  misc_feature: 545 for SV(C|O) and mtDNA

SEQ ID NO: 79233 - DNA, 120 bp, Homo sapiens; identical to SEQ ID NO: 53776
  misc_feature: 544 for SV(C|O) and mtDNA

SEQ ID NO: 79234 - DNA, 120 bp, Homo sapiens; identical to SEQ ID NO: 59510
  misc_feature: 544 for SV(C|O) and mtDNA

SEQ ID NO: 79235 - DNA, 120 bp, Homo sapiens
  misc_feature: 544 for SV(C|O) and mtDNA
cctcaggatactcctcaatagccatcgctgtagtatatccaaagacaaccatcattccccctaaataaattaaaaaaactattaaacccatataacctcccccaaaattcagaataataa

SEQ ID NO: 79236 - DNA, 120 bp, Homo sapiens
  misc_feature: 544 for SV(C|O) and mtDNA
aaacgcctgagccctatctattactctcatcgctacctccctgacaagcgcctatagcactcgaataattcttctcaccctaacaggtcaacctcgcttccccacccttactaacattaa

SEQ ID NO: 79237 - DNA, 120 bp, Homo sapiens
  misc_feature: 544 for SV(C|O) and mtDNA
tgatatcatagctcagaccatacctatgtatccaaatggttctttttttccggagtagtaagttacaatatgggagattattccgaagcctggtaggataagaatataaacttcagggtg

SEQ ID NO: 79238 - DNA, 120 bp, Homo sapiens
  misc_feature: 544 for SV(C|O) and mtDNA
aagagaggaagtaaagtttaattatgcctttttgggttgaggtgatgatggaggtggagatttggtgctgtgaaattgttttaggtaatagcttttctagtcaggttaggtctaggagga

SEQ ID NO: 79239 - DNA, 120 bp, Homo sapiens
  misc_feature: 544 for SV(C|O) and mtDNA
tcatcaaaaagctattagtgggagtagagtttgaagtccttgagagaggattatgatgcgactgtgagtgcgttcgtagtttgagtttgctaggcagaatagtaatgaggatgtaagtcc

SEQ ID NO: 79240 - DNA, 120 bp, Homo sapiens
  misc_feature: 544 for SV(C|O) and mtDNA
agaataaggcgaaggggcctgcggcgtattcgatgttgaagcctgagactagttcggactctccttcggcaaggtcgaagggggttcggttggtctctgctagtgtggagataaatcata

SEQ ID NO: 79241 - DNA, 120 bp, Homo sapiens
  misc_feature: 544 for SV(C|O) and mtDNA
tagtgggagtagagtttgaagtccttgagagaggattatgatgcgactgtgagtgcgttcgtagtttgagtttgctaggcagaatagtaatgaggatgtaagtccgtgggcgattatgag

SEQ ID NO: 79242 - DNA, 120 bp, Homo sapiens
  misc_feature: 544 for SV(C|O) and mtDNA
aggaggcctgcccccgctaaccggctttttgcccaaatgggccattatcgaagaattcacaaaaaacaatagcctcatcatccccaccatcatagccaccatcaccctccttaacctcta

SEQ ID NO: 79243 - DNA, 120 bp, Homo sapiens
  misc_feature: 544 for SV(C|O) and mtDNA
tactagtcacagccctatactccctctacatatttaccacaacacaatggggctcactcacccaccacattaacaacataaaaccctcattcacacgagaaaacaccctcatgttcatac

SEQ ID NO: 79244 - DNA, 120 bp, Homo sapiens; identical to SEQ ID NO: 60691
  misc_feature: 544 for SV(C|O) and mtDNA

SEQ ID NO: 79245 - DNA, 120 bp, Homo sapiens
  misc_feature: 544 for SV(C|O) and mtDNA
ccaaatgcatggagagctcccgtgagtggttaatagggtgatagacctgtgatccatcgtgatgtcttatttaaggggaacgtgtgggctatttaggctttatggccctgaagtaggaac

SEQ ID NO: 79246 - DNA, 120 bp, Homo sapiens
  misc_feature: 544 for SV(C|O) and mtDNA
gtctttggagtagaaacctgtgaggaaaggtattcctgctaatgctaggctgccaatggtgagggaggttgaagtgagaggtatggttttgagtagtcctcctatttttcggatatcttg

SEQ ID NO: 79247 - DNA, 120 bp, Homo sapiens
  misc_feature: 544 for SV(C|O) and mtDNA
gtcagctaaatactttgacgccggtggggatagcgatgattatggtagcggaggtgaaatatgctcgtgtgtctacgtctattcctactgtaaatatatggtgtgctcacacgataaacc

SEQ ID NO: 79248 - DNA, 120 bp, Homo sapiens
  misc_feature: 544 for SV(C|O) and mtDNA
gtagtatacccccggtcgtgtagcggtgaaagtggtttggtttagacgtccgggaattgcatctgtttttaagcctaatgtggggacagctcatgagtgcaagacgtcttgtgatgtaat

SEQ ID NO: 79249 - DNA, 120 bp, Homo sapiens
  misc_feature: 544 for SV(C|O) and mtDNA
gccctactccactcaagcactatagttgtagcaggaatcttcttactcatccgcttccaccccctagcagaaaatagcccactaatccaaactctaacactatgcttaggcgctatcacc

SEQ ID NO: 79250 - DNA, 120 bp, Homo sapiens; identical to SEQ ID NO: 62301
  misc_feature: 544 for SV(C|O) and mtDNA

SEQ ID NO: 79251 - DNA, 120 bp, Homo sapiens; identical to SEQ ID NO: 60522
  misc_feature: 544 for SV(C|O) and mtDNA

SEQ ID NO: 79252 - DNA, 120 bp, Homo sapiens
  misc_feature: 544 for SV(C|O) and mtDNA
cgccggaggaggagaccccattctataccaacacctattctgatttttcggtcaccctgaagtttatattcttatcctaccaggcttcggaataatctcccatattgtaacttactactc

SEQ ID NO: 79253 - DNA, 120 bp, Homo sapiens
  misc_feature: 544 for SV(C|O) and mtDNA
cttgtttcaggtgcgagatagtagtagggtcgtggtgctggagtttaagttgagtagtaggaatgcggtagtagttaggataatataaatagttaaattaagaatggttatgttagggtt

SEQ ID NO: 79254 - DNA, 120 bp, Homo sapiens
  misc_feature: 544 for SV(C|O) and mtDNA
aacacctattctgatttttcggtcaccctgaagtttatattcttatcctaccaggcttcggaataatctcccatattgtaacttactactccggaaaaaaagaaccatttggatacatag

SEQ ID NO: 79255 - DNA, 120 bp, Homo sapiens
  misc_feature: 544 for SV(C|O) and mtDNA
ctatactccctctacatatttaccacaacacaatggggctcactcacccaccacattaacaacataaaaccctcattcacacgagaaaacaccctcatgttcatacacctatcccccatt

SEQ ID NO: 79256 - DNA, 120 bp, Homo sapiens
  misc_feature: 544 for SV(C|O) and mtDNA
cgtgttacatcgcgccatcattggtatatggttagtgtgttggttagtaggcctagtatgaggagcgttatggagtggaagtgaaatcacatggctaggccggaggtcattaggagggct

SEQ ID NO: 79257 - DNA, 120 bp, Homo sapiens
  misc_feature: 544 for SV(C|O) and mtDNA
aataagtggctcctttaacctctccacccttatcacaacacaagaacacctctgattactcctgccatcatgacccttggccataatatgatttatctccacactagcagagaccaaccg

SEQ ID NO: 79258 - DNA, 120 bp, Homo sapiens
  misc_feature: 544 for SV(C|O) and mtDNA
attcagccataatttacgtctcgagtgatgtgggcgattgatgaaaaggcggttgaggcgtctggtgagtagtgcatggctaggaatagtcctgtggtgatttggaggatcaggcaggcg

SEQ ID NO: 79259 - DNA, 120 bp, Homo sapiens
  misc_feature: 544 for SV(C|O) and mtDNA
ccttaacaatgaacaagatatccgaaaaataggaggactactcaaaaccatacctctcacttcaacctccctcaccattggcagcctagcattagcaggaatacctttcctcacaggttt

SEQ ID NO: 79260 - DNA, 120 bp, Homo sapiens
  misc_feature: 544 for SV(C|O) and mtDNA
acagctcatgagtgcaagacgtcttgtgatgtaattattatacgaatgggggcttcaatcgggagtactactcgattgtcaacgtcaaggagtcgcaggtcgcctggttctaggaataat

SEQ ID NO: 79261 - DNA, 120 bp, Homo sapiens; identical to SEQ ID NO: 61566
  misc_feature: 544 for SV(C|O) and mtDNA

SEQ ID NO: 79262 - DNA, 120 bp, Homo sapiens
  misc_feature: 544 for SV(C|O) and mtDNA
aaagtttaattatgcctttttgggttgaggtgatgatggaggtggagatttggtgctgtgaaattgttttaggtaatagcttttctagtcaggttaggtctaggaggagtaggggcaggt

SEQ ID NO: 79263 - DNA, 120 bp, Homo sapiens
  misc_feature: 544 for SV(C|O) and mtDNA
aagtttaattatgcctttttgggttgaggtgatgatggaggtggagatttggtgctgtgaaattgttttaggtaatagcttttctagtcaggttaggtctaggaggagtaggggcaggtt

SEQ ID NO: 79264 - DNA, 120 bp, Homo sapiens
  misc_feature: 543 for SV(C|O) and mtDNA
catacctctcacttcaacctccctcaccattggcagcctagcattagcaggaatacctttcctcacaggtttctactccaaagaccacatcatcgaaaccgcaaacatatcatacacaaa

SEQ ID NO: 79265 - DNA, 120 bp, Homo sapiens; identical to SEQ ID NO: 54544
  misc_feature: 543 for SV(C|O) and mtDNA

SEQ ID NO: 79266 - DNA, 120 bp, Homo sapiens
  misc_feature: 543 for SV(C|O) and mtDNA
ttcgtgcaagaataggaggtggagtgctgctagggctgcaataatgaagggcaagatgaagtgaaaggtaaagaatcgtgtgagggtgggactgtctactgagtagcctcctcagattca

SEQ ID NO: 79267 - DNA, 120 bp, Homo sapiens
  misc_feature: 543 for SV(C|O) and mtDNA
gacagctcatgagtgcaagacgtcttgtgatgtaattattatacgaatgggggcttcaatcgggagtactactcgattgtcaacgtcaaggagtcgcaggtcgcctggttctaggaataa

SEQ ID NO: 79268 - DNA, 120 bp, Homo sapiens
  misc_feature: 543 for SV(C|O) and mtDNA
aaaaggcgggagaagccccggcaggtttgaagctgcttcttcgaatttgcaattcaatatgaaaatcacctcggagctggtaaaaagaggcctaacccctgtctttagatttacagtcca

SEQ ID NO: 79269 - DNA, 120 bp, Homo sapiens
  misc_feature: 543 for SV(C|O) and mtDNA
cttacctccctctctcctactcctgctcgcatctgctatagtggaggccggagcaggaacaggttgaacagtctaccctcccttagcagggaactactcccaccctggagcctccgtaga

SEQ ID NO: 79270 - DNA, 120 bp, Homo sapiens
  misc_feature: 543 for SV(C|O) and mtDNA
tcgcagtgcgccgatcagggcgtagtttgagtttgatgctcaccctgatcagaggattgagtaaacggctaggctagaggtggctagaataaataggaggcctaggttgaggttgaccag

SEQ ID NO: 79271 - DNA, 120 bp, Homo sapiens
  misc_feature: 543 for SV(C|O) and mtDNA
tatatgggtttaatagtttttttaatttatttagggggaatgatggttgtctttggatatactacagcgatggctattgaggagtatcctgaggcatgggggtcaggggttgaggtcttg

SEQ ID NO: 79272 - DNA, 120 bp, Homo sapiens
  misc_feature: 543 for SV(C|O) and mtDNA
acagcctaattattagcatcatccctctactattttttaaccaaatcaacaacaacctatttagctgttccccaaccttttcctccgaccccctaacaacccccctcctaatactaacta

SEQ ID NO: 79273 - DNA, 120 bp, Homo sapiens
  misc_feature: 543 for SV(C|O) and mtDNA
acagatgcaattcccggacgtctaaaccaaaccactttcaccgctacacgaccgggggtatactacggtcaatgctctgaaatctgtggagcaaaccacagtttcatgcccatcgtccta

SEQ ID NO: 79274 - DNA, 120 bp, Homo sapiens
  misc_feature: 543 for SV(C|O) and mtDNA
ggtggccttggtatgtgctttctcgtgttacatcgcgccatcattggtatatggttagtgtgttggttagtaggcctagtatgaggagcgttatggagtggaagtgaaatcacatggcta

SEQ ID NO: 79275 - DNA, 120 bp, Homo sapiens
  misc_feature: 543 for SV(C|O) and mtDNA
agaatattgaggcgccattggcgtgaaggtagcggatgattcagccataatttacgtctcgagtgatgtgggcgattgatgaaaaggcggttgaggcgtctggtgagtagtgcatggcta

SEQ ID NO: 79276 - DNA, 120 bp, Homo sapiens; identical to SEQ ID NO: 58530
  misc_feature: 543 for SV(C|O) and mtDNA

SEQ ID NO: 79277 - DNA, 120 bp, Homo sapiens
  misc_feature: 543 for SV(C|O) and mtDNA
taagcatagtgttagagtttggattagtgggctattttctgctagggggtggaagcggatgagtaagaagattcctgctacaactatagtgcttgagtggagtagggctgagactggggt

SEQ ID NO: 79278 - DNA, 120 bp, Homo sapiens
  misc_feature: 543 for SV(C|O) and mtDNA
gtggcgagtcagctaaatactttgacgccggtggggatagcgatgattatggtagcggaggtgaaatatgctcgtgtgtctacgtctattcctactgtaaatatatggtgtgctcacacg

SEQ ID NO: 79279 - DNA, 120 bp, Homo sapiens
  misc_feature: 543 for SV(C|O) and mtDNA
gctaatgctaggctgccaatggtgagggaggttgaagtgagaggtatggttttgagtagtcctcctatttttcggatatcttgttcattgttaaggttgtggatgatggacccggagcac

SEQ ID NO: 79280 - DNA, 120 bp, Homo sapiens
  misc_feature: 543 for SV(C|O) and mtDNA
gtagagtttgaagtccttgagagaggattatgatgcgactgtgagtgcgttcgtagtttgagtttgctaggcagaatagtaatgaggatgtaagtccgtgggcgattatgagaatgactg

SEQ ID NO: 79281 - DNA, 120 bp, Homo sapiens
  misc_feature: 543 for SV(C|O) and mtDNA
agtttaactaagctatactaaccccagggttggtcaatttcgtgccagccaccgcggtcacacgattaacccaagtcaatagaagccggcgtaaagagtgttttagatcaccccctcccc

SEQ ID NO: 79282 - DNA, 120 bp, Homo sapiens; identical to SEQ ID NO: 57311
  misc_feature: 543 for SV(C|O) and mtDNA

SEQ ID NO: 79283 - DNA, 120 bp, Homo sapiens
  misc_feature: 543 for SV(C|O) and mtDNA
ggcctgcccccgctaaccggctttttgcccaaatgggccattatcgaagaattcacaaaaaacaatagcctcatcatccccaccatcatagccaccatcaccctccttaacctctacttc

SEQ ID NO: 79284 - DNA, 120 bp, Homo sapiens
  misc_feature: 543 for SV(C|O) and mtDNA
acagccctatactccctctacatatttaccacaacacaatggggctcactcacccaccacattaacaacataaaaccctcattcacacgagaaaacaccctcatgttcatacacctatcc

SEQ ID NO: 79285 - DNA, 120 bp, Homo sapiens
  misc_feature: 543 for SV(C|O) and mtDNA
gctcatgagtgcaagacgtcttgtgatgtaattattatacgaatgggggcttcaatcgggagtactactcgattgtcaacgtcaaggagtcgcaggtcgcctggttctaggaataatggg

SEQ ID NO: 79286 - DNA, 120 bp, Homo sapiens; identical to SEQ ID NO: 61140
  misc_feature: 543 for SV(C|O) and mtDNA

SEQ ID NO: 79287 - DNA, 120 bp, Homo sapiens
  misc_feature: 543 for SV(C|O) and mtDNA
ccctggtcaacctcaacctaggcctcctatttattctagccacctctagcctagccgtttactcaatcctctgatcagggtgagcatcaaactcaaactacgccctgatcggcgcactgc

SEQ ID NO: 79288 - DNA, 120 bp, Homo sapiens
  misc_feature: 543 for SV(C|O) and mtDNA
attattagcatcatccctctactattttttaaccaaatcaacaacaacctatttagctgttccccaaccttttcctccgaccccctaacaacccccctcctaatactaactacctgactc

SEQ ID NO: 79289 - DNA, 120 bp, Homo sapiens
  misc_feature: 543 for SV(C|O) and mtDNA
acattaggcttaaaaacagatgcaattcccggacgtctaaaccaaaccactttcaccgctacacgaccgggggtatactacggtcaatgctctgaaatctgtggagcaaaccacagtttc

SEQ ID NO: 79290 - DNA, 120 bp, Homo sapiens; identical to SEQ ID NO: 55222
  misc_feature: 543 for SV(C|O) and mtDNA

SEQ ID NO: 79291 - DNA, 120 bp, Homo sapiens; identical to SEQ ID NO: 61966
  misc_feature: 543 for SV(C|O) and mtDNA

SEQ ID NO: 79292 - DNA, 120 bp, Homo sapiens; identical to SEQ ID NO: 60337
  misc_feature: 543 for SV(C|O) and mtDNA

SEQ ID NO: 79293 - DNA, 120 bp, Homo sapiens
  misc_feature: 543 for SV(C|O) and mtDNA
catgagctgtccccacattaggcttaaaaacagatgcaattcccggacgtctaaaccaaaccactttcaccgctacacgaccgggggtatactacggtcaatgctctgaaatctgtggag

SEQ ID NO: 79294 - DNA, 120 bp, Homo sapiens
  misc_feature: 543 for SV(C|O) and mtDNA
caaatcagcccaattaggtctccacccctgactcccctcagccatagaaggccccaccccagtctcagccctactccactcaagcactatagttgtagcaggaatcttcttactcatccg

SEQ ID NO: 79295 - DNA, 120 bp, Homo sapiens
  misc_feature: 543 for SV(C|O) and mtDNA
cctcataatcattttccttatctgcttcctagtcctgtatgcccttttcctaacactcacaacaaaactaactaatactaacatctcagacgctcaggaaatagaaaccgtctgaactat

SEQ ID NO: 79296 - DNA, 120 bp, Homo sapiens
  misc_feature: 543 for SV(C|O) and mtDNA
cctaggaggcctgcccccgctaaccggctttttgcccaaatgggccattatcgaagaattcacaaaaaacaatagcctcatcatccccaccatcatagccaccatcaccctccttaacct

SEQ ID NO: 79297 - DNA, 120 bp, Homo sapiens
  misc_feature: 543 for SV(C|O) and mtDNA
ccacagtaattacaaacttactatccgccatcccatacattgggacagacctagttcaatgaatctgaggaggctactcagtagacagtcccaccctcacacgattctttacctttcact

SEQ ID NO: 79298 - DNA, 120 bp, Homo sapiens
  misc_feature: 543 for SV(C|O) and mtDNA
catttgggcaaaaagccggttagcgggggcaggcctcctagggagaggagggtggatggaattaagggtgttagtcatgttagcttgtttcaggtgcgagatagtagtagggtcgtggtg

SEQ ID NO: 79299 - DNA, 120 bp, Homo sapiens
  misc_feature: 543 for SV(C|O) and mtDNA
actgctcgcagtgcgccgatcagggcgtagtttgagtttgatgctcaccctgatcagaggattgagtaaacggctaggctagaggtggctagaataaataggaggcctaggttgaggttg

SEQ ID NO: 79300 - DNA, 120 bp, Homo sapiens; identical to SEQ ID NO: 58470
  misc_feature: 543 for SV(C|O) and mtDNA

SEQ ID NO: 79301 - DNA, 120 bp, Homo sapiens
  misc_feature: 542 for SV(C|O) and mtDNA
tgctaggctgccaatggtgagggaggttgaagtgagaggtatggttttgagtagtcctcctatttttcggatatcttgttcattgttaaggttgtggatgatggacccggagcacataaa

SEQ ID NO: 79302 - DNA, 120 bp, Homo sapiens; identical to SEQ ID NO: 54079
  misc_feature: 542 for SV(C|O) and mtDNA

SEQ ID NO: 79303 - DNA, 120 bp, Homo sapiens; identical to SEQ ID NO: 61078
  misc_feature: 542 for SV(C|O) and mtDNA

SEQ ID NO: 79304 - DNA, 120 bp, Homo sapiens
  misc_feature: 542 for SV(C|O) and mtDNA
gaccccattctataccaacacctattctgatttttcggtcaccctgaagtttatattcttatcctaccaggcttcggaataatctcccatattgtaacttactactccggaaaaaaagaa

SEQ ID NO: 79305 - DNA, 120 bp, Homo sapiens
  misc_feature: 542 for SV(C|O) and mtDNA
ccctaacaaaaaaaactcatacccccattatgtaaaatccattgtcgcatccacctttattatcagtctcttccccacaacaatattcatgtgcctagaccaagaagttattatctcgaa

SEQ ID NO: 79306 - DNA, 120 bp, Homo sapiens; identical to SEQ ID NO: 60473
  misc_feature: 542 for SV(C|O) and mtDNA

SEQ ID NO: 79307 - DNA, 120 bp, Homo sapiens
  misc_feature: 542 for SV(C|O) and mtDNA
accaaatgcatggagagctcccgtgagtggttaatagggtgatagacctgtgatccatcgtgatgtcttatttaaggggaacgtgtgggctatttaggctttatggccctgaagtaggaa

SEQ ID NO: 79308 - DNA, 120 bp, Homo sapiens
  misc_feature: 542 for SV(C|O) and mtDNA
ttcaggtgcgagatagtagtagggtcgtggtgctggagtttaagttgagtagtaggaatgcggtagtagttaggataatataaatagttaaattaagaatggttatgttagggttgtacg

SEQ ID NO: 79309 - DNA, 120 bp, Homo sapiens
  misc_feature: 542 for SV(C|O) and mtDNA
tgcctcaggatactcctcaatagccatcgctgtagtatatccaaagacaaccatcattccccctaaataaattaaaaaaactattaaacccatataacctcccccaaaattcagaataat

SEQ ID NO: 79310 - DNA, 120 bp, Homo sapiens
  misc_feature: 542 for SV(C|O) and mtDNA
tgagtggttaatagggtgatagacctgtgatccatcgtgatgtcttatttaaggggaacgtgtgggctatttaggctttatggccctgaagtaggaaccagatgtcggatacagttcact

SEQ ID NO: 79311 - DNA, 120 bp, Homo sapiens; identical to SEQ ID NO: 62844
  misc_feature: 542 for SV(C|O) and mtDNA

SEQ ID NO: 79312 - DNA, 120 bp, Homo sapiens
  misc_feature: 542 for SV(C|O) and mtDNA
tacaatcggcatcaaccaaccacacctagcattcctgcacatctgtacccacgccttcttcaaagccatactatttatgtgctccgggtccatcatccacaaccttaacaatgaacaaga

SEQ ID NO: 79313 - DNA, 120 bp, Homo sapiens
  misc_feature: 542 for SV(C|O) and mtDNA
tcgcaggcggcaaagactagtatggcaataggcacaatattggctaagagggagtgggtgttgagggttatgagagtagctataatgaacagtgatagtattattccttctaggcatagt

SEQ ID NO: 79314 - DNA, 120 bp, Homo sapiens
  misc_feature: 542 for SV(C|O) and mtDNA
ggcaaagactagtatggcaataggcacaatattggctaagagggagtgggtgttgagggttatgagagtagctataatgaacagtgatagtattattccttctaggcatagtagggagga

SEQ ID NO: 79315 - DNA, 120 bp, Homo sapiens; identical to SEQ ID NO: 54708
  misc_feature: 542 for SV(C|O) and mtDNA

SEQ ID NO: 79316 - DNA, 120 bp, Homo sapiens
  misc_feature: 542 for SV(C|O) and mtDNA
tccctaggaggcctgcccccgctaaccggctttttgcccaaatgggccattatcgaagaattcacaaaaaacaatagcctcatcatccccaccatcatagccaccatcaccctccttaac

SEQ ID NO: 79317 - DNA, 120 bp, Homo sapiens
  misc_feature: 542 for SV(C|O) and mtDNA
tcccgtgagtggttaatagggtgatagacctgtgatccatcgtgatgtcttatttaaggggaacgtgtgggctatttaggctttatggccctgaagtaggaaccagatgtcggatacagt

SEQ ID NO: 79318 - DNA, 120 bp, Homo sapiens
  misc_feature: 542 for SV(C|O) and mtDNA
tccaggtcggtttctatctacttcaaattcctccctgtacgaaaggacaagagaaataaggcctacttcacaaagcgccttcccccgtaaatgatatcatctcaacttagtattataccc

SEQ ID NO: 79319 - DNA, 120 bp, Homo sapiens
  misc_feature: 542 for SV(C|O) and mtDNA
ggacagctcatgagtgcaagacgtcttgtgatgtaattattatacgaatgggggcttcaatcgggagtactactcgattgtcaacgtcaaggagtcgcaggtcgcctggttctaggaata

SEQ ID NO: 79320 - DNA, 120 bp, Homo sapiens
  misc_feature: 542 for SV(C|O) and mtDNA
caacacctattctgatttttcggtcaccctgaagtttatattcttatcctaccaggcttcggaataatctcccatattgtaacttactactccggaaaaaaagaaccatttggatacata

SEQ ID NO: 79321 - DNA, 120 bp, Homo sapiens
  misc_feature: 542 for SV(C|O) and mtDNA
tagtcacagccctatactccctctacatatttaccacaacacaatggggctcactcacccaccacattaacaacataaaaccctcattcacacgagaaaacaccctcatgttcatacacc

SEQ ID NO: 79322 - DNA, 120 bp, Homo sapiens; identical to SEQ ID NO: 59644
  misc_feature: 542 for SV(C|O) and mtDNA

SEQ ID NO: 79323 - DNA, 120 bp, Homo sapiens
  misc_feature: 542 for SV(C|O) and mtDNA
taatactatcactgttcattatagctactctcataaccctcaacacccactccctcttagccaatattgtgcctattgccatactagtctttgccgcctgcgaagcagcggtgggcctag

SEQ ID NO: 79324 - DNA, 120 bp, Homo sapiens
  misc_feature: 542 for SV(C|O) and mtDNA
taataagtggctcctttaacctctccacccttatcacaacacaagaacacctctgattactcctgccatcatgacccttggccataatatgatttatctccacactagcagagaccaacc

SEQ ID NO: 79325 - DNA, 120 bp, Homo sapiens
  misc_feature: 542 for SV(C|O) and mtDNA
gtgagtggttaatagggtgatagacctgtgatccatcgtgatgtcttatttaaggggaacgtgtgggctatttaggctttatggccctgaagtaggaaccagatgtcggatacagttcac

SEQ ID NO: 79326 - DNA, 120 bp, Homo sapiens
  misc_feature: 542 for SV(C|O) and mtDNA
ctcacaacaaaactaactaatactaacatctcagacgctcaggaaatagaaaccgtctgaactatcctgcccgccatcatcctagtcctcatcgccctcccatccctgcgcatcctttac

SEQ ID NO: 79327 - DNA, 120 bp, Homo sapiens
  misc_feature: 542 for SV(C|O) and mtDNA
cctatctattactctcatcgctacctccctgacaagcgcctatagcactcgaataattcttctcaccctaacaggtcaacctcgcttccccacccttactaacattaacgaaaataaccc

SEQ ID NO: 79328 - DNA, 120 bp, Homo sapiens
  misc_feature: 542 for SV(C|O) and mtDNA
agcatcatccctctactattttttaaccaaatcaacaacaacctatttagctgttccccaaccttttcctccgaccccctaacaacccccctcctaatactaactacctgactcctaccc

SEQ ID NO: 79329 - DNA, 120 bp, Homo sapiens
  misc_feature: 542 for SV(C|O) and mtDNA
gagaggaagtaaagtttaattatgcctttttgggttgaggtgatgatggaggtggagatttggtgctgtgaaattgttttaggtaatagcttttctagtcaggttaggtctaggaggagt

SEQ ID NO: 79330 - DNA, 120 bp, Homo sapiens
  misc_feature: 542 for SV(C|O) and mtDNA
cgcctaatctactccacctcaatcacactactccccatatctaacaacgtaaaaataaaatgacagtttgaacatacaaaacccaccccattcctccccacactcatcgcccttaccacg

SEQ ID NO: 79331 - DNA, 120 bp, Homo sapiens
  misc_feature: 542 for SV(C|O) and mtDNA
cccctggtcaacctcaacctaggcctcctatttattctagccacctctagcctagccgtttactcaatcctctgatcagggtgagcatcaaactcaaactacgccctgatcggcgcactg

SEQ ID NO: 79332 - DNA, 120 bp, Homo sapiens; identical to SEQ ID NO: 58491
  misc_feature: 542 for SV(C|O) and mtDNA

SEQ ID NO: 79333 - DNA, 120 bp, Homo sapiens; identical to SEQ ID NO: 60792
  misc_feature: 542 for SV(C|O) and mtDNA

SEQ ID NO: 79334 - DNA, 120 bp, Homo sapiens
  misc_feature: 541 for SV(C|O) and mtDNA
tttcgtgcaagaataggaggtggagtgctgctagggctgcaataatgaagggcaagatgaagtgaaaggtaaagaatcgtgtgagggtgggactgtctactgagtagcctcctcagattc

SEQ ID NO: 79335 - DNA, 120 bp, Homo sapiens
  misc_feature: 541 for SV(C|O) and mtDNA
ttgtttcaggtgcgagatagtagtagggtcgtggtgctggagtttaagttgagtagtaggaatgcggtagtagttaggataatataaatagttaaattaagaatggttatgttagggttg

SEQ ID NO: 79336 - DNA, 120 bp, Homo sapiens
  misc_feature: 541 for SV(C|O) and mtDNA
ggaaggtgattttatcggaatgggaggtgattcctagggggttgtttgatcccgtttcgtgcaagaataggaggtggagtgctgctagggctgcaataatgaagggcaagatgaagtgaa

SEQ ID NO: 79337 - DNA, 120 bp, Homo sapiens
  misc_feature: 541 for SV(C|O) and mtDNA
cgtagtatacccccggtcgtgtagcggtgaaagtggtttggtttagacgtccgggaattgcatctgtttttaagcctaatgtggggacagctcatgagtgcaagacgtcttgtgatgtaa

SEQ ID NO: 79338 - DNA, 120 bp, Homo sapiens
  misc_feature: 541 for SV(C|O) and mtDNA
aagtaaggtcagctaaataagctatcgggcccataccccgaaaatgttggttatacccttcccgtactaattaatcccctggcccaacccgtcatctactctaccatctttgcaggcaca

SEQ ID NO: 79339 - DNA, 120 bp, Homo sapiens
  misc_feature: 541 for SV(C|O) and mtDNA
tgtagtacgatgtctagtgatgagtttgctaatacaatgccagtcaggccgcctacggtgaaaagaaagatgaatcctagggctcagagcactgcagcagatcatttcatattgcttccg

SEQ ID NO: 79340 - DNA, 120 bp, Homo sapiens
  misc_feature: 541 for SV(C|O) and mtDNA
ccctatactccctctacatatttaccacaacacaatggggctcactcacccaccacattaacaacataaaaccctcattcacacgagaaaacaccctcatgttcatacacctatccccca

SEQ ID NO: 79341 - DNA, 120 bp, Homo sapiens; identical to SEQ ID NO: 59013
  misc_feature: 541 for SV(C|O) and mtDNA

SEQ ID NO: 79342 - DNA, 120 bp, Homo sapiens
  misc_feature: 541 for SV(C|O) and mtDNA
tgatccgtcctaatcacagcagtcctacttctcctatctctcccagtcctagctgctggcatcactatactactaacagaccgcaacctcaacaccaccttcttcgaccccgccggagga

SEQ ID NO: 79343 - DNA, 120 bp, Homo sapiens; identical to SEQ ID NO: 61151
  misc_feature: 541 for SV(C|O) and mtDNA

SEQ ID NO: 79344 - DNA, 120 bp, Homo sapiens; identical to SEQ ID NO: 62116
  misc_feature: 541 for SV(C|O) and mtDNA

SEQ ID NO: 79345 - DNA, 120 bp, Homo sapiens; identical to SEQ ID NO: 60347
  misc_feature: 541 for SV(C|O) and mtDNA

SEQ ID NO: 79346 - DNA, 120 bp, Homo sapiens
  misc_feature: 541 for SV(C|O) and mtDNA
tccgggtccatcatccacaaccttaacaatgaacaagatatccgaaaaataggaggactactcaaaaccatacctctcacttcaacctccctcaccattggcagcctagcattagcagga

SEQ ID NO: 79347 - DNA, 120 bp, Homo sapiens; identical to SEQ ID NO: 58955
  misc_feature: 541 for SV(C|O) and mtDNA

SEQ ID NO: 79348 - DNA, 120 bp, Homo sapiens
  misc_feature: 541 for SV(C|O) and mtDNA
tcaaagacgccctcggcttacttctcttccttctctccttaatgacattaacactattctcaccagacctcctaggcgacccagacaattataccctagccaaccccttaaacacccctc

SEQ ID NO: 79349 - DNA, 120 bp, Homo sapiens
  misc_feature: 541 for SV(C|O) and mtDNA
gcctcaggatactcctcaatagccatcgctgtagtatatccaaagacaaccatcattccccctaaataaattaaaaaaactattaaacccatataacctcccccaaaattcagaataata

SEQ ID NO: 79350 - DNA, 120 bp, Homo sapiens
  misc_feature: 541 for SV(C|O) and mtDNA
aatgctaggctgccaatggtgagggaggttgaagtgagaggtatggttttgagtagtcctcctatttttcggatatcttgttcattgttaaggttgtggatgatggacccggagcacata

SEQ ID NO: 79351 - DNA, 120 bp, Homo sapiens; identical to SEQ ID NO: 59113
  misc_feature: 541 for SV(C|O) and mtDNA

SEQ ID NO: 79352 - DNA, 120 bp, Homo sapiens
  misc_feature: 541 for SV(C|O) and mtDNA
tagtacgatgtctagtgatgagtttgctaatacaatgccagtcaggccgcctacggtgaaaagaaagatgaatcctagggctcagagcactgcagcagatcatttcatattgcttccgtg

SEQ ID NO: 79353 - DNA, 120 bp, Homo sapiens
  misc_feature: 541 for SV(C|O) and mtDNA
gagataataacttcttggtctaggcacatgaatattgttgtggggaagagactgataataaaggtggatgcgacaatggattttacataatgggggtatgagttttttttgttagggtta

SEQ ID NO: 79354 - DNA, 120 bp, Homo sapiens
  misc_feature: 541 for SV(C|O) and mtDNA
ccctaggaggcctgcccccgctaaccggctttttgcccaaatgggccattatcgaagaattcacaaaaaacaatagcctcatcatccccaccatcatagccaccatcaccctccttaacc

SEQ ID NO: 79355 - DNA, 120 bp, Homo sapiens
  misc_feature: 541 for SV(C|O) and mtDNA
atccaggtcggtttctatctacttcaaattcctccctgtacgaaaggacaagagaaataaggcctacttcacaaagcgccttcccccgtaaatgatatcatctcaacttagtattatacc

SEQ ID NO: 79356 - DNA, 120 bp, Homo sapiens
  misc_feature: 541 for SV(C|O) and mtDNA
acgaaagtttaactaagctatactaaccccagggttggtcaatttcgtgccagccaccgcggtcacacgattaacccaagtcaatagaagccggcgtaaagagtgttttagatcaccccc

SEQ ID NO: 79357 - DNA, 120 bp, Homo sapiens
  misc_feature: 541 for SV(C|O) and mtDNA
actccctctacatatttaccacaacacaatggggctcactcacccaccacattaacaacataaaaccctcattcacacgagaaaacaccctcatgttcatacacctatcccccattctcc

SEQ ID NO: 79358 - DNA, 120 bp, Homo sapiens
  misc_feature: 541 for SV(C|O) and mtDNA
ggaataatactatcactgttcattatagctactctcataaccctcaacacccactccctcttagccaatattgtgcctattgccatactagtctttgccgcctgcgaagcagcggtgggc

SEQ ID NO: 79359 - DNA, 120 bp, Homo sapiens
  misc_feature: 541 for SV(C|O) and mtDNA
cgtgccagccaccgcggtcacacgattaacccaagtcaatagaagccggcgtaaagagtgttttagatcaccccctccccaataaagctaaaactcacctgagttgtaaaaaactccagc

SEQ ID NO: 79360 - DNA, 120 bp, Homo sapiens
  misc_feature: 541 for SV(C|O) and mtDNA
aagtaaagtttaattatgcctttttgggttgaggtgatgatggaggtggagatttggtgctgtgaaattgttttaggtaatagcttttctagtcaggttaggtctaggaggagtaggggc

SEQ ID NO: 79361 - DNA, 120 bp, Homo sapiens
  misc_feature: 541 for SV(C|O) and mtDNA
gagtgcaagacgtcttgtgatgtaattattatacgaatgggggcttcaatcgggagtactactcgattgtcaacgtcaaggagtcgcaggtcgcctggttctaggaataatgggggaagt

SEQ ID NO: 79362 - DNA, 120 bp, Homo sapiens
  misc_feature: 541 for SV(C|O) and mtDNA
gaataaggcgaaggggcctgcggcgtattcgatgttgaagcctgagactagttcggactctccttcggcaaggtcgaagggggttcggttggtctctgctagtgtggagataaatcatat

SEQ ID NO: 79363 - DNA, 120 bp, Homo sapiens
  misc_feature: 541 for SV(C|O) and mtDNA
cttaaaaacagatgcaattcccggacgtctaaaccaaaccactttcaccgctacacgaccgggggtatactacggtcaatgctctgaaatctgtggagcaaaccacagtttcatgcccat

SEQ ID NO: 79364 - DNA, 120 bp, Homo sapiens
  misc_feature: 541 for SV(C|O) and mtDNA
ctcccgtgagtggttaatagggtgatagacctgtgatccatcgtgatgtcttatttaaggggaacgtgtgggctatttaggctttatggccctgaagtaggaaccagatgtcggatacag

SEQ ID NO: 79365 - DNA, 120 bp, Homo sapiens
  misc_feature: 541 for SV(C|O) and mtDNA
cagatgcaattcccggacgtctaaaccaaaccactttcaccgctacacgaccgggggtatactacggtcaatgctctgaaatctgtggagcaaaccacagtttcatgcccatcgtcctag

SEQ ID NO: 79366 - DNA, 120 bp, Homo sapiens
  misc_feature: 541 for SV(C|O) and mtDNA
caaccttaacaatgaacaagatatccgaaaaataggaggactactcaaaaccatacctctcacttcaacctccctcaccattggcagcctagcattagcaggaatacctttcctcacagg

SEQ ID NO: 79367 - DNA, 120 bp, Homo sapiens; identical to SEQ ID NO: 58361
  misc_feature: 541 for SV(C|O) and mtDNA

SEQ ID NO: 79368 - DNA, 120 bp, Homo sapiens
  misc_feature: 541 for SV(C|O) and mtDNA
ccattctataccaacacctattctgatttttcggtcaccctgaagtttatattcttatcctaccaggcttcggaataatctcccatattgtaacttactactccggaaaaaaagaaccat

SEQ ID NO: 79369 - DNA, 120 bp, Homo sapiens
  misc_feature: 541 for SV(C|O) and mtDNA
attagtgggagtagagtttgaagtccttgagagaggattatgatgcgactgtgagtgcgttcgtagtttgagtttgctaggcagaatagtaatgaggatgtaagtccgtgggcgattatg

SEQ ID NO: 79370 - DNA, 120 bp, Homo sapiens; identical to SEQ ID NO: 58845
  misc_feature: 541 for SV(C|O) and mtDNA

SEQ ID NO: 79371 - DNA, 120 bp, Homo sapiens; identical to SEQ ID NO: 58875
  misc_feature: 541 for SV(C|O) and mtDNA

SEQ ID NO: 79372 - DNA, 120 bp, Homo sapiens
  misc_feature: 541 for SV(C|O) and mtDNA
agtaagttacaatatgggagattattccgaagcctggtaggataagaatataaacttcagggtgaccgaaaaatcagaataggtgttggtatagaatggggtctcctcctccggcggggt

SEQ ID NO: 79373 - DNA, 120 bp, Homo sapiens
  misc_feature: 541 for SV(C|O) and mtDNA
aacagatgcaattcccggacgtctaaaccaaaccactttcaccgctacacgaccgggggtatactacggtcaatgctctgaaatctgtggagcaaaccacagtttcatgcccatcgtcct

SEQ ID NO: 79374 - DNA, 120 bp, Homo sapiens
  misc_feature: 541 for SV(C|O) and mtDNA
aataaggcgaaggggcctgcggcgtattcgatgttgaagcctgagactagttcggactctccttcggcaaggtcgaagggggttcggttggtctctgctagtgtggagataaatcatatt

SEQ ID NO: 79375 - DNA, 120 bp, Homo sapiens; identical to SEQ ID NO: 60252
  misc_feature: 540 for SV(C|O) and mtDNA

SEQ ID NO: 79376 - DNA, 120 bp, Homo sapiens
  misc_feature: 540 for SV(C|O) and mtDNA
ttattagcatcatccctctactattttttaaccaaatcaacaacaacctatttagctgttccccaaccttttcctccgaccccctaacaacccccctcctaatactaactacctgactcc

SEQ ID NO: 79377 - DNA, 120 bp, Homo sapiens
  misc_feature: 540 for SV(C|O) and mtDNA
tgcacgaaacgggatcaaacaaccccctaggaatcacctcccattccgataaaatcaccttccacccttactacacaatcaaagacgccctcggcttacttctcttccttctctccttaa

SEQ ID NO: 79378 - DNA, 120 bp, Homo sapiens; identical to SEQ ID NO: 62740
  misc_feature: 540 for SV(C|O) and mtDNA

SEQ ID NO: 79379 - DNA, 120 bp, Homo sapiens
  misc_feature: 540 for SV(C|O) and mtDNA
cccattctataccaacacctattctgatttttcggtcaccctgaagtttatattcttatcctaccaggcttcggaataatctcccatattgtaacttactactccggaaaaaaagaacca

SEQ ID NO: 79380 - DNA, 120 bp, Homo sapiens
  misc_feature: 540 for SV(C|O) and mtDNA
gcttaaaaacagatgcaattcccggacgtctaaaccaaaccactttcaccgctacacgaccgggggtatactacggtcaatgctctgaaatctgtggagcaaaccacagtttcatgccca

SEQ ID NO: 79381 - DNA, 120 bp, Homo sapiens; identical to SEQ ID NO: 57443
  misc_feature: 540 for SV(C|O) and mtDNA

SEQ ID NO: 79382 - DNA, 120 bp, Homo sapiens
  misc_feature: 540 for SV(C|O) and mtDNA
tattagcatcatccctctactattttttaaccaaatcaacaacaacctatttagctgttccccaaccttttcctccgaccccctaacaacccccctcctaatactaactacctgactcct

SEQ ID NO: 79383 - DNA, 120 bp, Homo sapiens
  misc_feature: 540 for SV(C|O) and mtDNA
tacctccctctctcctactcctgctcgcatctgctatagtggaggccggagcaggaacaggttgaacagtctaccctcccttagcagggaactactcccaccctggagcctccgtagacc

SEQ ID NO: 79384 - DNA, 120 bp, Homo sapiens
  misc_feature: 540 for SV(C|O) and mtDNA
agtatacccccggtcgtgtagcggtgaaagtggtttggtttagacgtccgggaattgcatctgtttttaagcctaatgtggggacagctcatgagtgcaagacgtcttgtgatgtaatta

SEQ ID NO: 79385 - DNA, 120 bp, Homo sapiens
  misc_feature: 540 for SV(C|O) and mtDNA
gttactagcacagagagttctcccagtaggttaatagtggggggtaaggcgaggttagcgaggcttgctagaagtcatcaaaaagctattagtgggagtagagtttgaagtccttgagag

SEQ ID NO: 79386 - DNA, 120 bp, Homo sapiens; identical to SEQ ID NO: 59719
  misc_feature: 540 for SV(C|O) and mtDNA

SEQ ID NO: 79387 - DNA, 120 bp, Homo sapiens
  misc_feature: 540 for SV(C|O) and mtDNA
ccccattctataccaacacctattctgatttttcggtcaccctgaagtttatattcttatcctaccaggcttcggaataatctcccatattgtaacttactactccggaaaaaaagaacc

SEQ ID NO: 79388 - DNA, 120 bp, Homo sapiens; identical to SEQ ID NO: 62725
  misc_feature: 540 for SV(C|O) and mtDNA

SEQ ID NO: 79389 - DNA, 120 bp, Homo sapiens; identical to SEQ ID NO: 53324
  misc_feature: 540 for SV(C|O) and mtDNA

SEQ ID NO: 79390 - DNA, 120 bp, Homo sapiens
  misc_feature: 540 for SV(C|O) and mtDNA
agaatccaaaattctccgtgccacctatcacaccccatcctaaagtaaggtcagctaaataagctatcgggcccataccccgaaaatgttggttatacccttcccgtactaattaatccc

SEQ ID NO: 79391 - DNA, 120 bp, Homo sapiens; identical to SEQ ID NO: 59612
  misc_feature: 540 for SV(C|O) and mtDNA

SEQ ID NO: 79392 - DNA, 120 bp, Homo sapiens
  misc_feature: 540 for SV(C|O) and mtDNA
gcctgcccccgctaaccggctttttgcccaaatgggccattatcgaagaattcacaaaaaacaatagcctcatcatccccaccatcatagccaccatcaccctccttaacctctacttct

SEQ ID NO: 79393 - DNA, 120 bp, Homo sapiens
  misc_feature: 540 for SV(C|O) and mtDNA
gaccgtagtatacccccggtcgtgtagcggtgaaagtggtttggtttagacgtccgggaattgcatctgtttttaagcctaatgtggggacagctcatgagtgcaagacgtcttgtgatg

SEQ ID NO: 79394 - DNA, 120 bp, Homo sapiens
  misc_feature: 540 for SV(C|O) and mtDNA
ctttggagtagaaacctgtgaggaaaggtattcctgctaatgctaggctgccaatggtgagggaggttgaagtgagaggtatggttttgagtagtcctcctatttttcggatatcttgtt

SEQ ID NO: 79395 - DNA, 120 bp, Homo sapiens
  misc_feature: 540 for SV(C|O) and mtDNA
catcaaaaagctattagtgggagtagagtttgaagtccttgagagaggattatgatgcgactgtgagtgcgttcgtagtttgagtttgctaggcagaatagtaatgaggatgtaagtccg

SEQ ID NO: 79396 - DNA, 120 bp, Homo sapiens
  misc_feature: 540 for SV(C|O) and mtDNA
ccgccggaggaggagaccccattctataccaacacctattctgatttttcggtcaccctgaagtttatattcttatcctaccaggcttcggaataatctcccatattgtaacttactact

SEQ ID NO: 79397 - DNA, 120 bp, Homo sapiens
  misc_feature: 540 for SV(C|O) and mtDNA
aaaaagctattagtgggagtagagtttgaagtccttgagagaggattatgatgcgactgtgagtgcgttcgtagtttgagtttgctaggcagaatagtaatgaggatgtaagtccgtggg

SEQ ID NO: 79398 - DNA, 120 bp, Homo sapiens; identical to SEQ ID NO: 54750
  misc_feature: 540 for SV(C|O) and mtDNA

SEQ ID NO: 79399 - DNA, 120 bp, Homo sapiens
  misc_feature: 539 for SV(C|O) and mtDNA
tttcaggtgcgagatagtagtagggtcgtggtgctggagtttaagttgagtagtaggaatgcggtagtagttaggataatataaatagttaaattaagaatggttatgttagggttgtac

SEQ ID NO: 79400 - DNA, 120 bp, Homo sapiens
  misc_feature: 539 for SV(C|O) and mtDNA
ccatacctctcacttcaacctccctcaccattggcagcctagcattagcaggaatacctttcctcacaggtttctactccaaagaccacatcatcgaaaccgcaaacatatcatacacaa

SEQ ID NO: 79401 - DNA, 120 bp, Homo sapiens
  misc_feature: 539 for SV(C|O) and mtDNA
ttctcgtgttacatcgcgccatcattggtatatggttagtgtgttggttagtaggcctagtatgaggagcgttatggagtggaagtgaaatcacatggctaggccggaggtcattaggag

SEQ ID NO: 79402 - DNA, 120 bp, Homo sapiens
  misc_feature: 539 for SV(C|O) and mtDNA
agataataacttcttggtctaggcacatgaatattgttgtggggaagagactgataataaaggtggatgcgacaatggattttacataatgggggtatgagttttttttgttagggttaa

SEQ ID NO: 79403 - DNA, 120 bp, Homo sapiens
  misc_feature: 539 for SV(C|O) and mtDNA
ctaatgctaggctgccaatggtgagggaggttgaagtgagaggtatggttttgagtagtcctcctatttttcggatatcttgttcattgttaaggttgtggatgatggacccggagcaca

SEQ ID NO: 79404 - DNA, 120 bp, Homo sapiens
  misc_feature: 539 for SV(C|O) and mtDNA
tggtgggtgagtgagccccattgtgttgtggtaaatatgtagagggagtatagggctgtgactagtatgttgagtcctgtaagtaggagagtgatatttgatcaggagaacgtggttact

SEQ ID NO: 79405 - DNA, 120 bp, Homo sapiens; identical to SEQ ID NO: 62666
  misc_feature: 539 for SV(C|O) and mtDNA

SEQ ID NO: 79406 - DNA, 120 bp, Homo sapiens
  misc_feature: 539 for SV(C|O) and mtDNA
ccaggtcggtttctatctacttcaaattcctccctgtacgaaaggacaagagaaataaggcctacttcacaaagcgccttcccccgtaaatgatatcatctcaacttagtattataccca

SEQ ID NO: 79407 - DNA, 120 bp, Homo sapiens
  misc_feature: 539 for SV(C|O) and mtDNA
gtttaactaagctatactaaccccagggttggtcaatttcgtgccagccaccgcggtcacacgattaacccaagtcaatagaagccggcgtaaagagtgttttagatcaccccctcccca

SEQ ID NO: 79408 - DNA, 120 bp, Homo sapiens; identical to SEQ ID NO: 57759
  misc_feature: 539 for SV(C|O) and mtDNA

SEQ ID NO: 79409 - DNA, 120 bp, Homo sapiens
  misc_feature: 539 for SV(C|O) and mtDNA
gggtgagtgagccccattgtgttgtggtaaatatgtagagggagtatagggctgtgactagtatgttgagtcctgtaagtaggagagtgatatttgatcaggagaacgtggttactagca

SEQ ID NO: 79410 - DNA, 120 bp, Homo sapiens
  misc_feature: 539 for SV(C|O) and mtDNA
tctttggagtagaaacctgtgaggaaaggtattcctgctaatgctaggctgccaatggtgagggaggttgaagtgagaggtatggttttgagtagtcctcctatttttcggatatcttgt

SEQ ID NO: 79411 - DNA, 120 bp, Homo sapiens
  misc_feature: 539 for SV(C|O) and mtDNA
tctcgtgttacatcgcgccatcattggtatatggttagtgtgttggttagtaggcctagtatgaggagcgttatggagtggaagtgaaatcacatggctaggccggaggtcattaggagg

SEQ ID NO: 79412 - DNA, 120 bp, Homo sapiens
  misc_feature: 539 for SV(C|O) and mtDNA
taataacttcttggtctaggcacatgaatattgttgtggggaagagactgataataaaggtggatgcgacaatggattttacataatgggggtatgagttttttttgttagggttaacga

SEQ ID NO: 79413 - DNA, 120 bp, Homo sapiens
  misc_feature: 539 for SV(C|O) and mtDNA
tcgtgttacatcgcgccatcattggtatatggttagtgtgttggttagtaggcctagtatgaggagcgttatggagtggaagtgaaatcacatggctaggccggaggtcattaggagggc

SEQ ID NO: 79414 - DNA, 120 bp, Homo sapiens
  misc_feature: 539 for SV(C|O) and mtDNA
ccccgccggaggaggagaccccattctataccaacacctattctgatttttcggtcaccctgaagtttatattcttatcctaccaggcttcggaataatctcccatattgtaacttacta

SEQ ID NO: 79415 - DNA, 120 bp, Homo sapiens
  misc_feature: 539 for SV(C|O) and mtDNA
tagctgttacagaaattaagtattgcaacttactgagggctttgaaggctcttggtctgtatttaacctaaatttctataagattattagtataaaaggggagataggtaggagtagcgt

SEQ ID NO: 79416 - DNA, 120 bp, Homo sapiens; identical to SEQ ID NO: 63054
  misc_feature: 539 for SV(C|O) and mtDNA

SEQ ID NO: 79417 - DNA, 120 bp, Homo sapiens
  misc_feature: 539 for SV(C|O) and mtDNA
tactaaccccagggttggtcaatttcgtgccagccaccgcggtcacacgattaacccaagtcaatagaagccggcgtaaagagtgttttagatcaccccctccccaataaagctaaaact

SEQ ID NO: 79418 - DNA, 120 bp, Homo sapiens
  misc_feature: 539 for SV(C|O) and mtDNA
atactaaccccagggttggtcaatttcgtgccagccaccgcggtcacacgattaacccaagtcaatagaagccggcgtaaagagtgttttagatcaccccctccccaataaagctaaaac

SEQ ID NO: 79419 - DNA, 120 bp, Homo sapiens; identical to SEQ ID NO: 59609
  misc_feature: 539 for SV(C|O) and mtDNA

SEQ ID NO: 79420 - DNA, 120 bp, Homo sapiens
  misc_feature: 539 for SV(C|O) and mtDNA
ggtcccagaggttacccaaggcacccctctgacatccggcctgcttcttctcacatgacaaaaactagcccccatctcaatcatataccaaatctctccctcactaaacgtaagccttct

SEQ ID NO: 79421 - DNA, 120 bp, Homo sapiens; identical to SEQ ID NO: 53111
  misc_feature: 539 for SV(C|O) and mtDNA

SEQ ID NO: 79422 - DNA, 120 bp, Homo sapiens
  misc_feature: 539 for SV(C|O) and mtDNA
aaacagatgcaattcccggacgtctaaaccaaaccactttcaccgctacacgaccgggggtatactacggtcaatgctctgaaatctgtggagcaaaccacagtttcatgcccatcgtcc

SEQ ID NO: 79423 - DNA, 120 bp, Homo sapiens; identical to SEQ ID NO: 54096
  misc_feature: 539 for SV(C|O) and mtDNA

SEQ ID NO: 79424 - DNA, 120 bp, Homo sapiens
  misc_feature: 539 for SV(C|O) and mtDNA
gaggcctgcccccgctaaccggctttttgcccaaatgggccattatcgaagaattcacaaaaaacaatagcctcatcatccccaccatcatagccaccatcaccctccttaacctctact

SEQ ID NO: 79425 - DNA, 120 bp, Homo sapiens
  misc_feature: 539 for SV(C|O) and mtDNA
cttgacgttgacaatcgagtagtactcccgattgaagcccccattcgtataataattacatcacaagacgtcttgcactcatgagctgtccccacattaggcttaaaaacagatgcaatt

SEQ ID NO: 79426 - DNA, 120 bp, Homo sapiens
  misc_feature: 539 for SV(C|O) and mtDNA
ctcctttaacctctccacccttatcacaacacaagaacacctctgattactcctgccatcatgacccttggccataatatgatttatctccacactagcagagaccaaccgaaccccctt

SEQ ID NO: 79427 - DNA, 120 bp, Homo sapiens; identical to SEQ ID NO: 63229
  misc_feature: 539 for SV(C|O) and mtDNA

SEQ ID NO: 79428 - DNA, 120 bp, Homo sapiens
  misc_feature: 539 for SV(C|O) and mtDNA
aataatactatcactgttcattatagctactctcataaccctcaacacccactccctcttagccaatattgtgcctattgccatactagtctttgccgcctgcgaagcagcggtgggcct

SEQ ID NO: 79429 - DNA, 120 bp, Homo sapiens
  misc_feature: 538 for SV(C|O) and mtDNA
aaaggcgggagaagccccggcaggtttgaagctgcttcttcgaatttgcaattcaatatgaaaatcacctcggagctggtaaaaagaggcctaacccctgtctttagatttacagtccaa

SEQ ID NO: 79430 - DNA, 120 bp, Homo sapiens
  misc_feature: 538 for SV(C|O) and mtDNA
ttctataccaacacctattctgatttttcggtcaccctgaagtttatattcttatcctaccaggcttcggaataatctcccatattgtaacttactactccggaaaaaaagaaccatttg

SEQ ID NO: 79431 - DNA, 120 bp, Homo sapiens; identical to SEQ ID NO: 58879
  misc_feature: 538 for SV(C|O) and mtDNA

SEQ ID NO: 79432 - DNA, 120 bp, Homo sapiens
  misc_feature: 538 for SV(C|O) and mtDNA
ggtcttggtgacaaaatatgttgtgtagagttcaggggagagtgcgtcatatgttgttcctaggaagattgtagtggtgagggtgtttattataataatgtttgtgtattcggctatgaa

SEQ ID NO: 79433 - DNA, 120 bp, Homo sapiens
  misc_feature: 538 for SV(C|O) and mtDNA
tgttaggtactgtttgcattaataaattaaagctccatagggtcttctcgtcttgctgtgtcatgcccgcctcttcacgggcaggtcaatttcactggttaaaagtaagagacagctgaa

SEQ ID NO: 79434 - DNA, 120 bp, Homo sapiens
  misc_feature: 538 for SV(C|O) and mtDNA
ttacctccctctctcctactcctgctcgcatctgctatagtggaggccggagcaggaacaggttgaacagtctaccctcccttagcagggaactactcccaccctggagcctccgtagac

SEQ ID NO: 79435 - DNA, 120 bp, Homo sapiens
  misc_feature: 538 for SV(C|O) and mtDNA
tgctccgggtccatcatccacaaccttaacaatgaacaagatatccgaaaaataggaggactactcaaaaccatacctctcacttcaacctccctcaccattggcagcctagcattagca

SEQ ID NO: 79436 - DNA, 120 bp, Homo sapiens; identical to SEQ ID NO: 61590
  misc_feature: 538 for SV(C|O) and mtDNA

SEQ ID NO: 79437 - DNA, 120 bp, Homo sapiens; identical to SEQ ID NO: 63027
  misc_feature: 538 for SV(C|O) and mtDNA

SEQ ID NO: 79438 - DNA, 120 bp, Homo sapiens
  misc_feature: 538 for SV(C|O) and mtDNA
tccttagctgttacagaaattaagtattgcaacttactgagggctttgaaggctcttggtctgtatttaacctaaatttctataagattattagtataaaaggggagataggtaggagta

SEQ ID NO: 79439 - DNA, 120 bp, Homo sapiens
  misc_feature: 538 for SV(C|O) and mtDNA
catgagtgcaagacgtcttgtgatgtaattattatacgaatgggggcttcaatcgggagtactactcgattgtcaacgtcaaggagtcgcaggtcgcctggttctaggaataatggggga

SEQ ID NO: 79440 - DNA, 120 bp, Homo sapiens
  misc_feature: 538 for SV(C|O) and mtDNA
caatcggcatcaaccaaccacacctagcattcctgcacatctgtacccacgccttcttcaaagccatactatttatgtgctccgggtccatcatccacaaccttaacaatgaacaagata

SEQ ID NO: 79441 - DNA, 120 bp, Homo sapiens
  misc_feature: 538 for SV(C|O) and mtDNA
gcgagcttagcgctgtgatgagtgtgcctgcaaagatggtagagtagatgacgggttgggccaggggattaattagtacgggaagggtataaccaacattttcggggtatgggcccgata

SEQ ID NO: 79442 - DNA, 120 bp, Homo sapiens
  misc_feature: 538 for SV(C|O) and mtDNA
taggaggcctgcccccgctaaccggctttttgcccaaatgggccattatcgaagaattcacaaaaaacaatagcctcatcatccccaccatcatagccaccatcaccctccttaacctct

SEQ ID NO: 79443 - DNA, 120 bp, Homo sapiens
  misc_feature: 538 for SV(C|O) and mtDNA
taggaagttttttcataggaggtgtatgagttggtcgtagcggaatcgggggtatgctgttcgaattcataagaacagggaggttagaagtagggtcttggtgacaaaatatgttgtgta

SEQ ID NO: 79444 - DNA, 120 bp, Homo sapiens; identical to SEQ ID NO: 58020
  misc_feature: 538 for SV(C|O) and mtDNA

SEQ ID NO: 79445 - DNA, 120 bp, Homo sapiens
  misc_feature: 538 for SV(C|O) and mtDNA
ccgtagtatacccccggtcgtgtagcggtgaaagtggtttggtttagacgtccgggaattgcatctgtttttaagcctaatgtggggacagctcatgagtgcaagacgtcttgtgatgta

SEQ ID NO: 79446 - DNA, 120 bp, Homo sapiens
  misc_feature: 538 for SV(C|O) and mtDNA
taattattagcatcatccctctactattttttaaccaaatcaacaacaacctatttagctgttccccaaccttttcctccgaccccctaacaacccccctcctaatactaactacctgac

SEQ ID NO: 79447 - DNA, 120 bp, Homo sapiens
  misc_feature: 538 for SV(C|O) and mtDNA
taaaaacagatgcaattcccggacgtctaaaccaaaccactttcaccgctacacgaccgggggtatactacggtcaatgctctgaaatctgtggagcaaaccacagtttcatgcccatcg

SEQ ID NO: 79448 - DNA, 120 bp, Homo sapiens
  misc_feature: 538 for SV(C|O) and mtDNA
gtgggtgagtgagccccattgtgttgtggtaaatatgtagagggagtatagggctgtgactagtatgttgagtcctgtaagtaggagagtgatatttgatcaggagaacgtggttactag

SEQ ID NO: 79449 - DNA, 120 bp, Homo sapiens
  misc_feature: 538 for SV(C|O) and mtDNA
gtatacccccggtcgtgtagcggtgaaagtggtttggtttagacgtccgggaattgcatctgtttttaagcctaatgtggggacagctcatgagtgcaagacgtcttgtgatgtaattat

SEQ ID NO: 79450 - DNA, 120 bp, Homo sapiens
  misc_feature: 538 for SV(C|O) and mtDNA
gtaagttacaatatgggagattattccgaagcctggtaggataagaatataaacttcagggtgaccgaaaaatcagaataggtgttggtatagaatggggtctcctcctccggcggggtc

SEQ ID NO: 79451 - DNA, 120 bp, Homo sapiens
  misc_feature: 538 for SV(C|O) and mtDNA
aacgaaagtttaactaagctatactaaccccagggttggtcaatttcgtgccagccaccgcggtcacacgattaacccaagtcaatagaagccggcgtaaagagtgttttagatcacccc

SEQ ID NO: 79452 - DNA, 120 bp, Homo sapiens
  misc_feature: 538 for SV(C|O) and mtDNA
gccctatactccctctacatatttaccacaacacaatggggctcactcacccaccacattaacaacataaaaccctcattcacacgagaaaacaccctcatgttcatacacctatccccc

SEQ ID NO: 79453 - DNA, 120 bp, Homo sapiens
  misc_feature: 538 for SV(C|O) and mtDNA
cagccctatactccctctacatatttaccacaacacaatggggctcactcacccaccacattaacaacataaaaccctcattcacacgagaaaacaccctcatgttcatacacctatccc

SEQ ID NO: 79454 - DNA, 120 bp, Homo sapiens; identical to SEQ ID NO: 60831
  misc_feature: 538 for SV(C|O) and mtDNA

SEQ ID NO: 79455 - DNA, 120 bp, Homo sapiens
  misc_feature: 538 for SV(C|O) and mtDNA
gaataatactatcactgttcattatagctactctcataaccctcaacacccactccctcttagccaatattgtgcctattgccatactagtctttgccgcctgcgaagcagcggtgggcc

SEQ ID NO: 79456 - DNA, 120 bp, Homo sapiens
  misc_feature: 538 for SV(C|O) and mtDNA
caaagacgccctcggcttacttctcttccttctctccttaatgacattaacactattctcaccagacctcctaggcgacccagacaattataccctagccaaccccttaaacacccctcc

SEQ ID NO: 79457 - DNA, 120 bp, Homo sapiens
  misc_feature: 538 for SV(C|O) and mtDNA
atgagctgtccccacattaggcttaaaaacagatgcaattcccggacgtctaaaccaaaccactttcaccgctacacgaccgggggtatactacggtcaatgctctgaaatctgtggagc

SEQ ID NO: 79458 - DNA, 120 bp, Homo sapiens
  misc_feature: 538 for SV(C|O) and mtDNA
aaagaatattgaggcgccattggcgtgaaggtagcggatgattcagccataatttacgtctcgagtgatgtgggcgattgatgaaaaggcggttgaggcgtctggtgagtagtgcatggc

SEQ ID NO: 79459 - DNA, 120 bp, Homo sapiens
  misc_feature: 538 for SV(C|O) and mtDNA
cactaatagctttttgatgacttctagcaagcctcgctaacctcgccttaccccccactattaacctactgggagaactctctgtgctagtaaccacgttctcctgatcaaatatcactc

SEQ ID NO: 79460 - DNA, 120 bp, Homo sapiens
  misc_feature: 538 for SV(C|O) and mtDNA
ctcgtgttacatcgcgccatcattggtatatggttagtgtgttggttagtaggcctagtatgaggagcgttatggagtggaagtgaaatcacatggctaggccggaggtcattaggaggg

SEQ ID NO: 79461 - DNA, 120 bp, Homo sapiens
  misc_feature: 538 for SV(C|O) and mtDNA
ctaagcatagtgttagagtttggattagtgggctattttctgctagggggtggaagcggatgagtaagaagattcctgctacaactatagtgcttgagtggagtagggctgagactgggg

SEQ ID NO: 79462 - DNA, 120 bp, Homo sapiens
  misc_feature: 538 for SV(C|O) and mtDNA
ataataacttcttggtctaggcacatgaatattgttgtggggaagagactgataataaaggtggatgcgacaatggattttacataatgggggtatgagttttttttgttagggttaacg

SEQ ID NO: 79463 - DNA, 120 bp, Homo sapiens
  misc_feature: 538 for SV(C|O) and mtDNA
cggcaaagactagtatggcaataggcacaatattggctaagagggagtgggtgttgagggttatgagagtagctataatgaacagtgatagtattattccttctaggcatagtagggagg

SEQ ID NO: 79464 - DNA, 120 bp, Homo sapiens
  misc_feature: 538 for SV(C|O) and mtDNA
cagctcatgagtgcaagacgtcttgtgatgtaattattatacgaatgggggcttcaatcgggagtactactcgattgtcaacgtcaaggagtcgcaggtcgcctggttctaggaataatg

SEQ ID NO: 79465 - DNA, 120 bp, Homo sapiens
  misc_feature: 538 for SV(C|O) and mtDNA
aaaggacctggcggtgcttcatatccctctagaggagcctgttctgtaatcgataaaccccgatcaacctcaccacctcttgctcagcctatataccgccatcttcagcaaaccctgatg

SEQ ID NO: 79466 - DNA, 120 bp, Homo sapiens
  misc_feature: 538 for SV(C|O) and mtDNA
atgagttggtcgtagcggaatcgggggtatgctgttcgaattcataagaacagggaggttagaagtagggtcttggtgacaaaatatgttgtgtagagttcaggggagagtgcgtcatat

SEQ ID NO: 79467 - DNA, 120 bp, Homo sapiens
  misc_feature: 538 for SV(C|O) and mtDNA
aggggccacagtaattacaaacttactatccgccatcccatacattgggacagacctagttcaatgaatctgaggaggctactcagtagacagtcccaccctcacacgattctttacctt

SEQ ID NO: 79468 - DNA, 120 bp, Homo sapiens; identical to SEQ ID NO: 58403
  misc_feature: 538 for SV(C|O) and mtDNA

SEQ ID NO: 79469 - DNA, 120 bp, Homo sapiens; identical to SEQ ID NO: 57626
  misc_feature: 538 for SV(C|O) and mtDNA

SEQ ID NO: 79470 - DNA, 120 bp, Homo sapiens
  misc_feature: 538 for SV(C|O) and mtDNA
accgtagtatacccccggtcgtgtagcggtgaaagtggtttggtttagacgtccgggaattgcatctgtttttaagcctaatgtggggacagctcatgagtgcaagacgtcttgtgatgt

SEQ ID NO: 79471 - DNA, 120 bp, Homo sapiens
  misc_feature: 538 for SV(C|O) and mtDNA
aacgggatcaaacaaccccctaggaatcacctcccattccgataaaatcaccttccacccttactacacaatcaaagacgccctcggcttacttctcttccttctctccttaatgacatt

SEQ ID NO: 79472 - DNA, 120 bp, Homo sapiens
  misc_feature: 537 for SV(C|O) and mtDNA
tttggagtagaaacctgtgaggaaaggtattcctgctaatgctaggctgccaatggtgagggaggttgaagtgagaggtatggttttgagtagtcctcctatttttcggatatcttgttc

SEQ ID NO: 79473 - DNA, 120 bp, Homo sapiens; identical to SEQ ID NO: 53848
  misc_feature: 537 for SV(C|O) and mtDNA

SEQ ID NO: 79474 - DNA, 120 bp, Homo sapiens
  misc_feature: 537 for SV(C|O) and mtDNA
ttatatgggtttaatagtttttttaatttatttagggggaatgatggttgtctttggatatactacagcgatggctattgaggagtatcctgaggcatgggggtcaggggttgaggtctt

SEQ ID NO: 79475 - DNA, 120 bp, Homo sapiens; identical to SEQ ID NO: 56569
  misc_feature: 537 for SV(C|O) and mtDNA

SEQ ID NO: 79476 - DNA, 120 bp, Homo sapiens
  misc_feature: 537 for SV(C|O) and mtDNA
gctcccgtgagtggttaatagggtgatagacctgtgatccatcgtgatgtcttatttaaggggaacgtgtgggctatttaggctttatggccctgaagtaggaaccagatgtcggataca

SEQ ID NO: 79477 - DNA, 120 bp, Homo sapiens
  misc_feature: 537 for SV(C|O) and mtDNA
ccctactccactcaagcactatagttgtagcaggaatcttcttactcatccgcttccaccccctagcagaaaatagcccactaatccaaactctaacactatgcttaggcgctatcacca

SEQ ID NO: 79478 - DNA, 120 bp, Homo sapiens
  misc_feature: 537 for SV(C|O) and mtDNA
agtaaagtttaattatgcctttttgggttgaggtgatgatggaggtggagatttggtgctgtgaaattgttttaggtaatagcttttctagtcaggttaggtctaggaggagtaggggca

SEQ ID NO: 79479 - DNA, 120 bp, Homo sapiens; identical to SEQ ID NO: 57482
  misc_feature: 537 for SV(C|O) and mtDNA

SEQ ID NO: 79480 - DNA, 120 bp, Homo sapiens
  misc_feature: 537 for SV(C|O) and mtDNA
ctaaccccagggttggtcaatttcgtgccagccaccgcggtcacacgattaacccaagtcaatagaagccggcgtaaagagtgttttagatcaccccctccccaataaagctaaaactca

SEQ ID NO: 79481 - DNA, 120 bp, Homo sapiens
  misc_feature: 537 for SV(C|O) and mtDNA
cattaggcttaaaaacagatgcaattcccggacgtctaaaccaaaccactttcaccgctacacgaccgggggtatactacggtcaatgctctgaaatctgtggagcaaaccacagtttca

SEQ ID NO: 79482 - DNA, 120 bp, Homo sapiens
  misc_feature: 537 for SV(C|O) and mtDNA
taccaaatgcatggagagctcccgtgagtggttaatagggtgatagacctgtgatccatcgtgatgtcttatttaaggggaacgtgtgggctatttaggctttatggccctgaagtagga

SEQ ID NO: 79483 - DNA, 120 bp, Homo sapiens
  misc_feature: 537 for SV(C|O) and mtDNA
tcaggtgcgagatagtagtagggtcgtggtgctggagtttaagttgagtagtaggaatgcggtagtagttaggataatataaatagttaaattaagaatggttatgttagggttgtacgg

SEQ ID NO: 79484 - DNA, 120 bp, Homo sapiens
  misc_feature: 537 for SV(C|O) and mtDNA
tattttctgctagggggtggaagcggatgagtaagaagattcctgctacaactatagtgcttgagtggagtagggctgagactggggtggggccttctatggctgaggggagtcaggggt

SEQ ID NO: 79485 - DNA, 120 bp, Homo sapiens
  misc_feature: 537 for SV(C|O) and mtDNA
ctaggctgccaatggtgagggaggttgaagtgagaggtatggttttgagtagtcctcctatttttcggatatcttgttcattgttaaggttgtggatgatggacccggagcacataaata

SEQ ID NO: 79486 - DNA, 120 bp, Homo sapiens
  misc_feature: 537 for SV(C|O) and mtDNA
tataccaacacctattctgatttttcggtcaccctgaagtttatattcttatcctaccaggcttcggaataatctcccatattgtaacttactactccggaaaaaaagaaccatttggat

SEQ ID NO: 79487 - DNA, 120 bp, Homo sapiens
  misc_feature: 537 for SV(C|O) and mtDNA
attagcatcatccctctactattttttaaccaaatcaacaacaacctatttagctgttccccaaccttttcctccgaccccctaacaacccccctcctaatactaactacctgactccta

SEQ ID NO: 79488 - DNA, 120 bp, Homo sapiens
  misc_feature: 537 for SV(C|O) and mtDNA
agaggaagtaaagtttaattatgcctttttgggttgaggtgatgatggaggtggagatttggtgctgtgaaattgttttaggtaatagcttttctagtcaggttaggtctaggaggagta

SEQ ID NO: 79489 - DNA, 120 bp, Homo sapiens; identical to SEQ ID NO: 53603
  misc_feature: 537 for SV(C|O) and mtDNA

SEQ ID NO: 79490 - DNA, 120 bp, Homo sapiens; identical to SEQ ID NO: 58529
  misc_feature: 537 for SV(C|O) and mtDNA

SEQ ID NO: 79491 - DNA, 120 bp, Homo sapiens
  misc_feature: 537 for SV(C|O) and mtDNA
agtaatccaggtcggtttctatctacttcaaattcctccctgtacgaaaggacaagagaaataaggcctacttcacaaagcgccttcccccgtaaatgatatcatctcaacttagtatta

SEQ ID NO: 79492 - DNA, 120 bp, Homo sapiens
  misc_feature: 537 for SV(C|O) and mtDNA
gtgggaagaagaaagagaggaagtaaagtttaattatgcctttttgggttgaggtgatgatggaggtggagatttggtgctgtgaaattgttttaggtaatagcttttctagtcaggtta

SEQ ID NO: 79493 - DNA, 120 bp, Homo sapiens
  misc_feature: 537 for SV(C|O) and mtDNA
gttttagatcaccccctccccaataaagctaaaactcacctgagttgtaaaaaactccagctgacacaaaatagactacgaaagtggctttaacatatctgaacacacaatagctaagac

SEQ ID NO: 79494 - DNA, 120 bp, Homo sapiens
  misc_feature: 537 for SV(C|O) and mtDNA
atacctctcacttcaacctccctcaccattggcagcctagcattagcaggaatacctttcctcacaggtttctactccaaagaccacatcatcgaaaccgcaaacatatcatacacaaac

SEQ ID NO: 79495 - DNA, 120 bp, Homo sapiens
  misc_feature: 537 for SV(C|O) and mtDNA
gccctatctattactctcatcgctacctccctgacaagcgcctatagcactcgaataattcttctcaccctaacaggtcaacctcgcttccccacccttactaacattaacgaaaataac

SEQ ID NO: 79496 - DNA, 120 bp, Homo sapiens
  misc_feature: 537 for SV(C|O) and mtDNA
agtaaggtcagctaaataagctatcgggcccataccccgaaaatgttggttatacccttcccgtactaattaatcccctggcccaacccgtcatctactctaccatctttgcaggcacac

SEQ ID NO: 79497 - DNA, 120 bp, Homo sapiens; identical to SEQ ID NO: 62848
  misc_feature: 537 for SV(C|O) and mtDNA

SEQ ID NO: 79498 - DNA, 120 bp, Homo sapiens; identical to SEQ ID NO: 59589
  misc_feature: 537 for SV(C|O) and mtDNA

SEQ ID NO: 79499 - DNA, 120 bp, Homo sapiens
  misc_feature: 537 for SV(C|O) and mtDNA
cccgccggaggaggagaccccattctataccaacacctattctgatttttcggtcaccctgaagtttatattcttatcctaccaggcttcggaataatctcccatattgtaacttactac

SEQ ID NO: 79500 - DNA, 120 bp, Homo sapiens
  misc_feature: 537 for SV(C|O) and mtDNA
gtaaggtcagctaaataagctatcgggcccataccccgaaaatgttggttatacccttcccgtactaattaatcccctggcccaacccgtcatctactctaccatctttgcaggcacact

SEQ ID NO: 79501 - DNA, 120 bp, Homo sapiens; identical to SEQ ID NO: 57574
  misc_feature: 537 for SV(C|O) and mtDNA

SEQ ID NO: 79502 - DNA, 120 bp, Homo sapiens; identical to SEQ ID NO: 61227
  misc_feature: 537 for SV(C|O) and mtDNA

SEQ ID NO: 79503 - DNA, 120 bp, Homo sapiens; identical to SEQ ID NO: 57699
  misc_feature: 537 for SV(C|O) and mtDNA

SEQ ID NO: 79504 - DNA, 120 bp, Homo sapiens; identical to SEQ ID NO: 55129
  misc_feature: 537 for SV(C|O) and mtDNA

SEQ ID NO: 79505 - DNA, 120 bp, Homo sapiens; identical to SEQ ID NO: 57521
  misc_feature: 537 for SV(C|O) and mtDNA

SEQ ID NO: 79506 - DNA, 120 bp, Homo sapiens
  misc_feature: 537 for SV(C|O) and mtDNA
ctcatgagtgcaagacgtcttgtgatgtaattattatacgaatgggggcttcaatcgggagtactactcgattgtcaacgtcaaggagtcgcaggtcgcctggttctaggaataatgggg

SEQ ID NO: 79507 - DNA, 120 bp, Homo sapiens
  misc_feature: 537 for SV(C|O) and mtDNA
acacctattctgatttttcggtcaccctgaagtttatattcttatcctaccaggcttcggaataatctcccatattgtaacttactactccggaaaaaaagaaccatttggatacatagg

SEQ ID NO: 79508 - DNA, 120 bp, Homo sapiens; identical to SEQ ID NO: 58124
  misc_feature: 537 for SV(C|O) and mtDNA

SEQ ID NO: 79509 - DNA, 120 bp, Homo sapiens; identical to SEQ ID NO: 61291
  misc_feature: 537 for SV(C|O) and mtDNA

SEQ ID NO: 79510 - DNA, 120 bp, Homo sapiens
  misc_feature: 537 for SV(C|O) and mtDNA
atatgtagagggagtatagggctgtgactagtatgttgagtcctgtaagtaggagagtgatatttgatcaggagaacgtggttactagcacagagagttctcccagtaggttaatagtgg

SEQ ID NO: 79511 - DNA, 120 bp, Homo sapiens
  misc_feature: 537 for SV(C|O) and mtDNA
acaatcggcatcaaccaaccacacctagcattcctgcacatctgtacccacgccttcttcaaagccatactatttatgtgctccgggtccatcatccacaaccttaacaatgaacaagat

SEQ ID NO: 79512 - DNA, 120 bp, Homo sapiens
  misc_feature: 537 for SV(C|O) and mtDNA
agtttcatgcccatcgtcctagaattaattcccctaaaaatctttgaaatagggcccgtatttaccctatagcaccccctctaccccctctagagcccactgtaaagctaacttagcatt

SEQ ID NO: 79513 - DNA, 120 bp, Homo sapiens
  misc_feature: 537 for SV(C|O) and mtDNA
aggctgccaatggtgagggaggttgaagtgagaggtatggttttgagtagtcctcctatttttcggatatcttgttcattgttaaggttgtggatgatggacccggagcacataaatagt

SEQ ID NO: 79514 - DNA, 120 bp, Homo sapiens
  misc_feature: 537 for SV(C|O) and mtDNA
aatgggggcttcaatcgggagtactactcgattgtcaacgtcaaggagtcgcaggtcgcctggttctaggaataatgggggaagtatgtaggagttgaagattagtccgccgtagtcggt

SEQ ID NO: 79515 - DNA, 120 bp, Homo sapiens; identical to SEQ ID NO: 57027
  misc_feature: 536 for SV(C|O) and mtDNA

SEQ ID NO: 79516 - DNA, 120 bp, Homo sapiens
  misc_feature: 536 for SV(C|O) and mtDNA
actgacaattaacagcccaatatctacaatcaaccaacaagtcattattaccctcactgtcaacccaacacaggcatgctcataaggaaaggttaaaaaaagtaaaaggaactcggcaaa

SEQ ID NO: 79517 - DNA, 120 bp, Homo sapiens
  misc_feature: 536 for SV(C|O) and mtDNA
tttaactaagctatactaaccccagggttggtcaatttcgtgccagccaccgcggtcacacgattaacccaagtcaatagaagccggcgtaaagagtgttttagatcaccccctccccaa

SEQ ID NO: 79518 - DNA, 120 bp, Homo sapiens
  misc_feature: 536 for SV(C|O) and mtDNA
ttggagtagaaacctgtgaggaaaggtattcctgctaatgctaggctgccaatggtgagggaggttgaagtgagaggtatggttttgagtagtcctcctatttttcggatatcttgttca

SEQ ID NO: 79519 - DNA, 120 bp, Homo sapiens
  misc_feature: 536 for SV(C|O) and mtDNA
tgggaagaagaaagagaggaagtaaagtttaattatgcctttttgggttgaggtgatgatggaggtggagatttggtgctgtgaaattgttttaggtaatagcttttctagtcaggttag

SEQ ID NO: 79520 - DNA, 120 bp, Homo sapiens
  misc_feature: 536 for SV(C|O) and mtDNA
tgaggggccacagtaattacaaacttactatccgccatcccatacattgggacagacctagttcaatgaatctgaggaggctactcagtagacagtcccaccctcacacgattctttacc

SEQ ID NO: 79521 - DNA, 120 bp, Homo sapiens; identical to SEQ ID NO: 56046
  misc_feature: 536 for SV(C|O) and mtDNA

SEQ ID NO: 79522 - DNA, 120 bp, Homo sapiens
  misc_feature: 536 for SV(C|O) and mtDNA
tcataatcattttccttatctgcttcctagtcctgtatgcccttttcctaacactcacaacaaaactaactaatactaacatctcagacgctcaggaaatagaaaccgtctgaactatcc

SEQ ID NO: 79523 - DNA, 120 bp, Homo sapiens
  misc_feature: 536 for SV(C|O) and mtDNA
ccctcataatcattttccttatctgcttcctagtcctgtatgcccttttcctaacactcacaacaaaactaactaatactaacatctcagacgctcaggaaatagaaaccgtctgaacta

SEQ ID NO: 79524 - DNA, 120 bp, Homo sapiens
  misc_feature: 536 for SV(C|O) and mtDNA
gttttggctcgtaagaaggcctagataggggattgtgcggtgtgtgatggtagggtagaatccgagtatgttggagaaataaaatgtgcatagtggggattttattttaagtttgttggt

SEQ ID NO: 79525 - DNA, 120 bp, Homo sapiens
  misc_feature: 536 for SV(C|O) and mtDNA
gtttcgtgcaagaataggaggtggagtgctgctagggctgcaataatgaagggcaagatgaagtgaaaggtaaagaatcgtgtgagggtgggactgtctactgagtagcctcctcagatt

SEQ ID NO: 79526 - DNA, 120 bp, Homo sapiens
  misc_feature: 536 for SV(C|O) and mtDNA
gttatatgggtttaatagtttttttaatttatttagggggaatgatggttgtctttggatatactacagcgatggctattgaggagtatcctgaggcatgggggtcaggggttgaggtct

SEQ ID NO: 79527 - DNA, 120 bp, Homo sapiens
  misc_feature: 536 for SV(C|O) and mtDNA
aaccccagggttggtcaatttcgtgccagccaccgcggtcacacgattaacccaagtcaatagaagccggcgtaaagagtgttttagatcaccccctccccaataaagctaaaactcacc

SEQ ID NO: 79528 - DNA, 120 bp, Homo sapiens; identical to SEQ ID NO: 60948
  misc_feature: 536 for SV(C|O) and mtDNA

SEQ ID NO: 79529 - DNA, 120 bp, Homo sapiens; identical to SEQ ID NO: 62993
  misc_feature: 536 for SV(C|O) and mtDNA

SEQ ID NO: 79530 - DNA, 120 bp, Homo sapiens
  misc_feature: 536 for SV(C|O) and mtDNA
gctaggctgccaatggtgagggaggttgaagtgagaggtatggttttgagtagtcctcctatttttcggatatcttgttcattgttaaggttgtggatgatggacccggagcacataaat

SEQ ID NO: 79531 - DNA, 120 bp, Homo sapiens
  misc_feature: 536 for SV(C|O) and mtDNA
aaatcagcccaattaggtctccacccctgactcccctcagccatagaaggccccaccccagtctcagccctactccactcaagcactatagttgtagcaggaatcttcttactcatccgc

SEQ ID NO: 79532 - DNA, 120 bp, Homo sapiens
  misc_feature: 536 for SV(C|O) and mtDNA
gcctaattattagcatcatccctctactattttttaaccaaatcaacaacaacctatttagctgttccccaaccttttcctccgaccccctaacaacccccctcctaatactaactacct

SEQ ID NO: 79533 - DNA, 120 bp, Homo sapiens
  misc_feature: 536 for SV(C|O) and mtDNA
aaaagctattagtgggagtagagtttgaagtccttgagagaggattatgatgcgactgtgagtgcgttcgtagtttgagtttgctaggcagaatagtaatgaggatgtaagtccgtgggc

SEQ ID NO: 79534 - DNA, 120 bp, Homo sapiens
  misc_feature: 536 for SV(C|O) and mtDNA
gaggggccacagtaattacaaacttactatccgccatcccatacattgggacagacctagttcaatgaatctgaggaggctactcagtagacagtcccaccctcacacgattctttacct

SEQ ID NO: 79535 - DNA, 120 bp, Homo sapiens
  misc_feature: 536 for SV(C|O) and mtDNA
gacccggagcacataaatagtatggctttgaagaaggcgtgggtacagatgtgcaggaatgctaggtgtggttggttgatgccgattgtaactattatgagtcctagttgacttgaagtg

SEQ ID NO: 79536 - DNA, 120 bp, Homo sapiens
  misc_feature: 536 for SV(C|O) and mtDNA
ccggagcacataaatagtatggctttgaagaaggcgtgggtacagatgtgcaggaatgctaggtgtggttggttgatgccgattgtaactattatgagtcctagttgacttgaagtggag

SEQ ID NO: 79537 - DNA, 120 bp, Homo sapiens; identical to SEQ ID NO: 61707
  misc_feature: 536 for SV(C|O) and mtDNA

SEQ ID NO: 79538 - DNA, 120 bp, Homo sapiens; identical to SEQ ID NO: 61356
  misc_feature: 536 for SV(C|O) and mtDNA

SEQ ID NO: 79539 - DNA, 120 bp, Homo sapiens
  misc_feature: 536 for SV(C|O) and mtDNA
agctcatgagtgcaagacgtcttgtgatgtaattattatacgaatgggggcttcaatcgggagtactactcgattgtcaacgtcaaggagtcgcaggtcgcctggttctaggaataatgg

SEQ ID NO: 79540 - DNA, 120 bp, Homo sapiens
  misc_feature: 536 for SV(C|O) and mtDNA
cacccacagcctaattattagcatcatccctctactattttttaaccaaatcaacaacaacctatttagctgttccccaaccttttcctccgaccccctaacaacccccctcctaatact

SEQ ID NO: 79541 - DNA, 120 bp, Homo sapiens
  misc_feature: 536 for SV(C|O) and mtDNA
actaatagctttttgatgacttctagcaagcctcgctaacctcgccttaccccccactattaacctactgggagaactctctgtgctagtaaccacgttctcctgatcaaatatcactct

SEQ ID NO: 79542 - DNA, 120 bp, Homo sapiens
  misc_feature: 536 for SV(C|O) and mtDNA
aacttcttggtctaggcacatgaatattgttgtggggaagagactgataataaaggtggatgcgacaatggattttacataatgggggtatgagttttttttgttagggttaacgagggt

SEQ ID NO: 79543 - DNA, 120 bp, Homo sapiens; identical to SEQ ID NO: 58365
  misc_feature: 536 for SV(C|O) and mtDNA

SEQ ID NO: 79544 - DNA, 120 bp, Homo sapiens; identical to SEQ ID NO: 59133
  misc_feature: 535 for SV(C|O) and mtDNA

SEQ ID NO: 79545 - DNA, 120 bp, Homo sapiens
  misc_feature: 535 for SV(C|O) and mtDNA
gagtcagctaaatactttgacgccggtggggatagcgatgattatggtagcggaggtgaaatatgctcgtgtgtctacgtctattcctactgtaaatatatggtgtgctcacacgataaa

SEQ ID NO: 79546 - DNA, 120 bp, Homo sapiens; identical to SEQ ID NO: 57321
  misc_feature: 535 for SV(C|O) and mtDNA

SEQ ID NO: 79547 - DNA, 120 bp, Homo sapiens
  misc_feature: 535 for SV(C|O) and mtDNA
atgcctcaggatactcctcaatagccatcgctgtagtatatccaaagacaaccatcattccccctaaataaattaaaaaaactattaaacccatataacctcccccaaaattcagaataa

SEQ ID NO: 79548 - DNA, 120 bp, Homo sapiens
  misc_feature: 535 for SV(C|O) and mtDNA
ttaaaaacagatgcaattcccggacgtctaaaccaaaccactttcaccgctacacgaccgggggtatactacggtcaatgctctgaaatctgtggagcaaaccacagtttcatgcccatc

SEQ ID NO: 79549 - DNA, 120 bp, Homo sapiens
  misc_feature: 535 for SV(C|O) and mtDNA
cacaaccttaacaatgaacaagatatccgaaaaataggaggactactcaaaaccatacctctcacttcaacctccctcaccattggcagcctagcattagcaggaatacctttcctcaca

SEQ ID NO: 79550 - DNA, 120 bp, Homo sapiens
  misc_feature: 535 for SV(C|O) and mtDNA
tggagtagaaacctgtgaggaaaggtattcctgctaatgctaggctgccaatggtgagggaggttgaagtgagaggtatggttttgagtagtcctcctatttttcggatatcttgttcat

SEQ ID NO: 79551 - DNA, 120 bp, Homo sapiens
  misc_feature: 535 for SV(C|O) and mtDNA
tggagagctcccgtgagtggttaatagggtgatagacctgtgatccatcgtgatgtcttatttaaggggaacgtgtgggctatttaggctttatggccctgaagtaggaaccagatgtcg

SEQ ID NO: 79552 - DNA, 120 bp, Homo sapiens; identical to SEQ ID NO: 63046
  misc_feature: 535 for SV(C|O) and mtDNA

SEQ ID NO: 79553 - DNA, 120 bp, Homo sapiens; identical to SEQ ID NO: 63219
  misc_feature: 535 for SV(C|O) and mtDNA

SEQ ID NO: 79554 - DNA, 120 bp, Homo sapiens
  misc_feature: 535 for SV(C|O) and mtDNA
ggaatgctaggtgtggttggttgatgccgattgtaactattatgagtcctagttgacttgaagtggagaaggctacgatttttttgatgtcattttgtgtaagggcgcagactgctgcga

SEQ ID NO: 79555 - DNA, 120 bp, Homo sapiens
  misc_feature: 535 for SV(C|O) and mtDNA
tcctttaacctctccacccttatcacaacacaagaacacctctgattactcctgccatcatgacccttggccataatatgatttatctccacactagcagagaccaaccgaacccccttc

SEQ ID NO: 79556 - DNA, 120 bp, Homo sapiens
  misc_feature: 535 for SV(C|O) and mtDNA
caaccacacctagcattcctgcacatctgtacccacgccttcttcaaagccatactatttatgtgctccgggtccatcatccacaaccttaacaatgaacaagatatccgaaaaatagga

SEQ ID NO: 79557 - DNA, 120 bp, Homo sapiens
  misc_feature: 535 for SV(C|O) and mtDNA
ctataccaacacctattctgatttttcggtcaccctgaagtttatattcttatcctaccaggcttcggaataatctcccatattgtaacttactactccggaaaaaaagaaccatttgga

SEQ ID NO: 79558 - DNA, 120 bp, Homo sapiens
  misc_feature: 535 for SV(C|O) and mtDNA
gggtccatcatccacaaccttaacaatgaacaagatatccgaaaaataggaggactactcaaaaccatacctctcacttcaacctccctcaccattggcagcctagcattagcaggaata

SEQ ID NO: 79559 - DNA, 120 bp, Homo sapiens
  misc_feature: 535 for SV(C|O) and mtDNA
ataatactatcactgttcattatagctactctcataaccctcaacacccactccctcttagccaatattgtgcctattgccatactagtctttgccgcctgcgaagcagcggtgggccta

SEQ ID NO: 79560 - DNA, 120 bp, Homo sapiens
  misc_feature: 535 for SV(C|O) and mtDNA
tacctaaaactcacagccctcgctgtcactttcctaggacttctaacagccctagacctcaactacctaaccaacaaacttaaaataaaatccccactatgcacattttatttctccaac

SEQ ID NO: 79561 - DNA, 120 bp, Homo sapiens
  misc_feature: 535 for SV(C|O) and mtDNA
taatgctaggctgccaatggtgagggaggttgaagtgagaggtatggttttgagtagtcctcctatttttcggatatcttgttcattgttaaggttgtggatgatggacccggagcacat

SEQ ID NO: 79562 - DNA, 120 bp, Homo sapiens
  misc_feature: 535 for SV(C|O) and mtDNA
ataaggcgaaggggcctgcggcgtattcgatgttgaagcctgagactagttcggactctccttcggcaaggtcgaagggggttcggttggtctctgctagtgtggagataaatcatatta

SEQ ID NO: 79563 - DNA, 120 bp, Homo sapiens
  misc_feature: 535 for SV(C|O) and mtDNA
gttaggtactgtttgcattaataaattaaagctccatagggtcttctcgtcttgctgtgtcatgcccgcctcttcacgggcaggtcaatttcactggttaaaagtaagagacagctgaac

SEQ ID NO: 79564 - DNA, 120 bp, Homo sapiens
  misc_feature: 535 for SV(C|O) and mtDNA
ccacagcctaattattagcatcatccctctactattttttaaccaaatcaacaacaacctatttagctgttccccaaccttttcctccgaccccctaacaacccccctcctaatactaac

SEQ ID NO: 79565 - DNA, 120 bp, Homo sapiens
  misc_feature: 535 for SV(C|O) and mtDNA
aacgcctgagccctatctattactctcatcgctacctccctgacaagcgcctatagcactcgaataattcttctcaccctaacaggtcaacctcgcttccccacccttactaacattaac

SEQ ID NO: 79566 - DNA, 120 bp, Homo sapiens
  misc_feature: 535 for SV(C|O) and mtDNA
gggatcaaacaaccccctaggaatcacctcccattccgataaaatcaccttccacccttactacacaatcaaagacgccctcggcttacttctcttccttctctccttaatgacattaac

SEQ ID NO: 79567 - DNA, 120 bp, Homo sapiens
  misc_feature: 535 for SV(C|O) and mtDNA
gataataacttcttggtctaggcacatgaatattgttgtggggaagagactgataataaaggtggatgcgacaatggattttacataatgggggtatgagttttttttgttagggttaac

SEQ ID NO: 79568 - DNA, 120 bp, Homo sapiens
  misc_feature: 535 for SV(C|O) and mtDNA
acgcctaatctactccacctcaatcacactactccccatatctaacaacgtaaaaataaaatgacagtttgaacatacaaaacccaccccattcctccccacactcatcgcccttaccac

SEQ ID NO: 79569 - DNA, 120 bp, Homo sapiens
  misc_feature: 535 for SV(C|O) and mtDNA
ggaggcctgcccccgctaaccggctttttgcccaaatgggccattatcgaagaattcacaaaaaacaatagcctcatcatccccaccatcatagccaccatcaccctccttaacctctac

SEQ ID NO: 79570 - DNA, 120 bp, Homo sapiens
  misc_feature: 535 for SV(C|O) and mtDNA
aaacgaaagtttaactaagctatactaaccccagggttggtcaatttcgtgccagccaccgcggtcacacgattaacccaagtcaatagaagccggcgtaaagagtgttttagatcaccc

SEQ ID NO: 79571 - DNA, 120 bp, Homo sapiens
  misc_feature: 535 for SV(C|O) and mtDNA
ggggcatttcactgtaaagaggtgttggttctcttaatctttaacttaaaaggttaatgctaagttagctttacagtgggctctagagggggtagagggggtgctatagggtaaatacgg

SEQ ID NO: 79572 - DNA, 120 bp, Homo sapiens
  misc_feature: 535 for SV(C|O) and mtDNA
gcggcaaagactagtatggcaataggcacaatattggctaagagggagtgggtgttgagggttatgagagtagctataatgaacagtgatagtattattccttctaggcatagtagggag

SEQ ID NO: 79573 - DNA, 120 bp, Homo sapiens
  misc_feature: 535 for SV(C|O) and mtDNA
ctcataatcattttccttatctgcttcctagtcctgtatgcccttttcctaacactcacaacaaaactaactaatactaacatctcagacgctcaggaaatagaaaccgtctgaactatc

SEQ ID NO: 79574 - DNA, 120 bp, Homo sapiens
  misc_feature: 535 for SV(C|O) and mtDNA
aaggggcctgcggcgtattcgatgttgaagcctgagactagttcggactctccttcggcaaggtcgaagggggttcggttggtctctgctagtgtggagataaatcatattatggccaag

SEQ ID NO: 79575 - DNA, 120 bp, Homo sapiens
  misc_feature: 535 for SV(C|O) and mtDNA
aggaagttttttcataggaggtgtatgagttggtcgtagcggaatcgggggtatgctgttcgaattcataagaacagggaggttagaagtagggtcttggtgacaaaatatgttgtgtag

SEQ ID NO: 79576 - DNA, 120 bp, Homo sapiens
  misc_feature: 535 for SV(C|O) and mtDNA
ccaaccacacctagcattcctgcacatctgtacccacgccttcttcaaagccatactatttatgtgctccgggtccatcatccacaaccttaacaatgaacaagatatccgaaaaatagg

SEQ ID NO: 79577 - DNA, 120 bp, Homo sapiens
  misc_feature: 535 for SV(C|O) and mtDNA
atgggggcttcaatcgggagtactactcgattgtcaacgtcaaggagtcgcaggtcgcctggttctaggaataatgggggaagtatgtaggagttgaagattagtccgccgtagtcggtg

SEQ ID NO: 79578 - DNA, 120 bp, Homo sapiens
  misc_feature: 535 for SV(C|O) and mtDNA
attctataccaacacctattctgatttttcggtcaccctgaagtttatattcttatcctaccaggcttcggaataatctcccatattgtaacttactactccggaaaaaaagaaccattt

SEQ ID NO: 79579 - DNA, 120 bp, Homo sapiens
  misc_feature: 535 for SV(C|O) and mtDNA
agctattagtgggagtagagtttgaagtccttgagagaggattatgatgcgactgtgagtgcgttcgtagtttgagtttgctaggcagaatagtaatgaggatgtaagtccgtgggcgat

SEQ ID NO: 79580 - DNA, 120 bp, Homo sapiens
  misc_feature: 535 for SV(C|O) and mtDNA
aagaatattgaggcgccattggcgtgaaggtagcggatgattcagccataatttacgtctcgagtgatgtgggcgattgatgaaaaggcggttgaggcgtctggtgagtagtgcatggct

SEQ ID NO: 79581 - DNA, 120 bp, Homo sapiens
  misc_feature: 535 for SV(C|O) and mtDNA
aaccttaacaatgaacaagatatccgaaaaataggaggactactcaaaaccatacctctcacttcaacctccctcaccattggcagcctagcattagcaggaatacctttcctcacaggt

SEQ ID NO: 79582 - DNA, 120 bp, Homo sapiens; identical to SEQ ID NO: 62888
  misc_feature: 534 for SV(C|O) and mtDNA

SEQ ID NO: 79583 - DNA, 120 bp, Homo sapiens; identical to SEQ ID NO: 62664
  misc_feature: 534 for SV(C|O) and mtDNA

SEQ ID NO: 79584 - DNA, 120 bp, Homo sapiens; identical to SEQ ID NO: 62669
  misc_feature: 534 for SV(C|O) and mtDNA

SEQ ID NO: 79585 - DNA, 120 bp, Homo sapiens
  misc_feature: 534 for SV(C|O) and mtDNA
cccacagcctaattattagcatcatccctctactattttttaaccaaatcaacaacaacctatttagctgttccccaaccttttcctccgaccccctaacaacccccctcctaatactaa

SEQ ID NO: 79586 - DNA, 120 bp, Homo sapiens
  misc_feature: 534 for SV(C|O) and mtDNA
ttaactaagctatactaaccccagggttggtcaatttcgtgccagccaccgcggtcacacgattaacccaagtcaatagaagccggcgtaaagagtgttttagatcaccccctccccaat

SEQ ID NO: 79587 - DNA, 120 bp, Homo sapiens; identical to SEQ ID NO: 61472
  misc_feature: 534 for SV(C|O) and mtDNA

SEQ ID NO: 79588 - DNA, 120 bp, Homo sapiens; identical to SEQ ID NO: 53370
  misc_feature: 534 for SV(C|O) and mtDNA

SEQ ID NO: 79589 - DNA, 120 bp, Homo sapiens
  misc_feature: 534 for SV(C|O) and mtDNA
tgagctgtccccacattaggcttaaaaacagatgcaattcccggacgtctaaaccaaaccactttcaccgctacacgaccgggggtatactacggtcaatgctctgaaatctgtggagca

SEQ ID NO: 79590 - DNA, 120 bp, Homo sapiens; identical to SEQ ID NO: 59946
  misc_feature: 534 for SV(C|O) and mtDNA

SEQ ID NO: 79591 - DNA, 120 bp, Homo sapiens; identical to SEQ ID NO: 61150
  misc_feature: 534 for SV(C|O) and mtDNA

SEQ ID NO: 79592 - DNA, 120 bp, Homo sapiens
  misc_feature: 534 for SV(C|O) and mtDNA
tgaggccaaatatcattctgaggggccacagtaattacaaacttactatccgccatcccatacattgggacagacctagttcaatgaatctgaggaggctactcagtagacagtcccacc

SEQ ID NO: 79593 - DNA, 120 bp, Homo sapiens
  misc_feature: 534 for SV(C|O) and mtDNA
tctattactctcatcgctacctccctgacaagcgcctatagcactcgaataattcttctcaccctaacaggtcaacctcgcttccccacccttactaacattaacgaaaataaccccacc

SEQ ID NO: 79594 - DNA, 120 bp, Homo sapiens
  misc_feature: 534 for SV(C|O) and mtDNA
cgcctgagccctatctattactctcatcgctacctccctgacaagcgcctatagcactcgaataattcttctcaccctaacaggtcaacctcgcttccccacccttactaacattaacga

SEQ ID NO: 79595 - DNA, 120 bp, Homo sapiens
  misc_feature: 534 for SV(C|O) and mtDNA
tcgtgccagccaccgcggtcacacgattaacccaagtcaatagaagccggcgtaaagagtgttttagatcaccccctccccaataaagctaaaactcacctgagttgtaaaaaactccag

SEQ ID NO: 79596 - DNA, 120 bp, Homo sapiens
  misc_feature: 534 for SV(C|O) and mtDNA
cccggagcacataaatagtatggctttgaagaaggcgtgggtacagatgtgcaggaatgctaggtgtggttggttgatgccgattgtaactattatgagtcctagttgacttgaagtgga

SEQ ID NO: 79597 - DNA, 120 bp, Homo sapiens
  misc_feature: 534 for SV(C|O) and mtDNA
gctatgaagaataaggcgaaggggcctgcggcgtattcgatgttgaagcctgagactagttcggactctccttcggcaaggtcgaagggggttcggttggtctctgctagtgtggagata

SEQ ID NO: 79598 - DNA, 120 bp, Homo sapiens; identical to SEQ ID NO: 59114
  misc_feature: 534 for SV(C|O) and mtDNA

SEQ ID NO: 79599 - DNA, 120 bp, Homo sapiens
  misc_feature: 534 for SV(C|O) and mtDNA
ggtgggtgagtgagccccattgtgttgtggtaaatatgtagagggagtatagggctgtgactagtatgttgagtcctgtaagtaggagagtgatatttgatcaggagaacgtggttacta

SEQ ID NO: 79600 - DNA, 120 bp, Homo sapiens
  misc_feature: 534 for SV(C|O) and mtDNA
agtgcaagacgtcttgtgatgtaattattatacgaatgggggcttcaatcgggagtactactcgattgtcaacgtcaaggagtcgcaggtcgcctggttctaggaataatgggggaagta

SEQ ID NO: 79601 - DNA, 120 bp, Homo sapiens
  misc_feature: 534 for SV(C|O) and mtDNA
ggctgccaatggtgagggaggttgaagtgagaggtatggttttgagtagtcctcctatttttcggatatcttgttcattgttaaggttgtggatgatggacccggagcacataaatagta

SEQ ID NO: 79602 - DNA, 120 bp, Homo sapiens
  misc_feature: 534 for SV(C|O) and mtDNA
cgcaggcggcaaagactagtatggcaataggcacaatattggctaagagggagtgggtgttgagggttatgagagtagctataatgaacagtgatagtattattccttctaggcatagta

SEQ ID NO: 79603 - DNA, 120 bp, Homo sapiens
  misc_feature: 534 for SV(C|O) and mtDNA
tacctctcacttcaacctccctcaccattggcagcctagcattagcaggaatacctttcctcacaggtttctactccaaagaccacatcatcgaaaccgcaaacatatcatacacaaacg

SEQ ID NO: 79604 - DNA, 120 bp, Homo sapiens
  misc_feature: 534 for SV(C|O) and mtDNA
taaggtcagctaaataagctatcgggcccataccccgaaaatgttggttatacccttcccgtactaattaatcccctggcccaacccgtcatctactctaccatctttgcaggcacactc

SEQ ID NO: 79605 - DNA, 120 bp, Homo sapiens
  misc_feature: 534 for SV(C|O) and mtDNA
taaccccagggttggtcaatttcgtgccagccaccgcggtcacacgattaacccaagtcaatagaagccggcgtaaagagtgttttagatcaccccctccccaataaagctaaaactcac

SEQ ID NO: 79606 - DNA, 120 bp, Homo sapiens
  misc_feature: 534 for SV(C|O) and mtDNA
accccattctataccaacacctattctgatttttcggtcaccctgaagtttatattcttatcctaccaggcttcggaataatctcccatattgtaacttactactccggaaaaaaagaac

SEQ ID NO: 79607 - DNA, 120 bp, Homo sapiens
  misc_feature: 534 for SV(C|O) and mtDNA
cgccctcataatcattttccttatctgcttcctagtcctgtatgcccttttcctaacactcacaacaaaactaactaatactaacatctcagacgctcaggaaatagaaaccgtctgaac

SEQ ID NO: 79608 - DNA, 120 bp, Homo sapiens
  misc_feature: 534 for SV(C|O) and mtDNA
caggtcggtttctatctacttcaaattcctccctgtacgaaaggacaagagaaataaggcctacttcacaaagcgccttcccccgtaaatgatatcatctcaacttagtattatacccac

SEQ ID NO: 79609 - DNA, 120 bp, Homo sapiens
  misc_feature: 534 for SV(C|O) and mtDNA
gtgaggccaaatatcattctgaggggccacagtaattacaaacttactatccgccatcccatacattgggacagacctagttcaatgaatctgaggaggctactcagtagacagtcccac

SEQ ID NO: 79610 - DNA, 120 bp, Homo sapiens; identical to SEQ ID NO: 53450
  misc_feature: 534 for SV(C|O) and mtDNA

SEQ ID NO: 79611 - DNA, 120 bp, Homo sapiens
  misc_feature: 534 for SV(C|O) and mtDNA
gctattagtgggagtagagtttgaagtccttgagagaggattatgatgcgactgtgagtgcgttcgtagtttgagtttgctaggcagaatagtaatgaggatgtaagtccgtgggcgatt

SEQ ID NO: 79612 - DNA, 120 bp, Homo sapiens; identical to SEQ ID NO: 63056
  misc_feature: 534 for SV(C|O) and mtDNA

SEQ ID NO: 79613 - DNA, 120 bp, Homo sapiens; identical to SEQ ID NO: 63043
  misc_feature: 534 for SV(C|O) and mtDNA

SEQ ID NO: 79614 - DNA, 120 bp, Homo sapiens
  misc_feature: 534 for SV(C|O) and mtDNA
cacagccctatactccctctacatatttaccacaacacaatggggctcactcacccaccacattaacaacataaaaccctcattcacacgagaaaacaccctcatgttcatacacctatc

SEQ ID NO: 79615 - DNA, 120 bp, Homo sapiens
  misc_feature: 534 for SV(C|O) and mtDNA
actaaccccagggttggtcaatttcgtgccagccaccgcggtcacacgattaacccaagtcaatagaagccggcgtaaagagtgttttagatcaccccctccccaataaagctaaaactc

SEQ ID NO: 79616 - DNA, 120 bp, Homo sapiens
  misc_feature: 534 for SV(C|O) and mtDNA
gagtaatccaggtcggtttctatctacttcaaattcctccctgtacgaaaggacaagagaaataaggcctacttcacaaagcgccttcccccgtaaatgatatcatctcaacttagtatt

SEQ ID NO: 79617 - DNA, 120 bp, Homo sapiens; identical to SEQ ID NO: 60303
  misc_feature: 534 for SV(C|O) and mtDNA

SEQ ID NO: 79618 - DNA, 120 bp, Homo sapiens
  misc_feature: 534 for SV(C|O) and mtDNA
gaggaagtaaagtttaattatgcctttttgggttgaggtgatgatggaggtggagatttggtgctgtgaaattgttttaggtaatagcttttctagtcaggttaggtctaggaggagtag

SEQ ID NO: 79619 - DNA, 120 bp, Homo sapiens; identical to SEQ ID NO: 56615
  misc_feature: 534 for SV(C|O) and mtDNA

SEQ ID NO: 79620 - DNA, 120 bp, Homo sapiens
  misc_feature: 534 for SV(C|O) and mtDNA
aaaacagatgcaattcccggacgtctaaaccaaaccactttcaccgctacacgaccgggggtatactacggtcaatgctctgaaatctgtggagcaaaccacagtttcatgcccatcgtc

SEQ ID NO: 79621 - DNA, 120 bp, Homo sapiens
  misc_feature: 534 for SV(C|O) and mtDNA
aaccacacctagcattcctgcacatctgtacccacgccttcttcaaagccatactatttatgtgctccgggtccatcatccacaaccttaacaatgaacaagatatccgaaaaataggag

SEQ ID NO: 79622 - DNA, 120 bp, Homo sapiens
  misc_feature: 534 for SV(C|O) and mtDNA
atacgaatgggggcttcaatcgggagtactactcgattgtcaacgtcaaggagtcgcaggtcgcctggttctaggaataatgggggaagtatgtaggagttgaagattagtccgccgtag

SEQ ID NO: 79623 - DNA, 120 bp, Homo sapiens; identical to SEQ ID NO: 59891
  misc_feature: 534 for SV(C|O) and mtDNA

SEQ ID NO: 79624 - DNA, 120 bp, Homo sapiens; identical to SEQ ID NO: 59126
  misc_feature: 534 for SV(C|O) and mtDNA

SEQ ID NO: 79625 - DNA, 120 bp, Homo sapiens; identical to SEQ ID NO: 56817
  misc_feature: 534 for SV(C|O) and mtDNA

SEQ ID NO: 79626 - DNA, 120 bp, Homo sapiens
  misc_feature: 534 for SV(C|O) and mtDNA
aatattgaggcgccattggcgtgaaggtagcggatgattcagccataatttacgtctcgagtgatgtgggcgattgatgaaaaggcggttgaggcgtctggtgagtagtgcatggctagg

SEQ ID NO: 79627 - DNA, 120 bp, Homo sapiens
  misc_feature: 534 for SV(C|O) and mtDNA
ccaacacctattctgatttttcggtcaccctgaagtttatattcttatcctaccaggcttcggaataatctcccatattgtaacttactactccggaaaaaaagaaccatttggatacat

SEQ ID NO: 79628 - DNA, 120 bp, Homo sapiens; identical to SEQ ID NO: 59700
  misc_feature: 534 for SV(C|O) and mtDNA

SEQ ID NO: 79629 - DNA, 120 bp, Homo sapiens
  misc_feature: 534 for SV(C|O) and mtDNA
attaggcttaaaaacagatgcaattcccggacgtctaaaccaaaccactttcaccgctacacgaccgggggtatactacggtcaatgctctgaaatctgtggagcaaaccacagtttcat

SEQ ID NO: 79630 - DNA, 120 bp, Homo sapiens; identical to SEQ ID NO: 56682
  misc_feature: 534 for SV(C|O) and mtDNA

SEQ ID NO: 79631 - DNA, 120 bp, Homo sapiens
  misc_feature: 534 for SV(C|O) and mtDNA
aattattagcatcatccctctactattttttaaccaaatcaacaacaacctatttagctgttccccaaccttttcctccgaccccctaacaacccccctcctaatactaactacctgact

SEQ ID NO: 79632 - DNA, 120 bp, Homo sapiens; identical to SEQ ID NO: 56822
  misc_feature: 533 for SV(C|O) and mtDNA

SEQ ID NO: 79633 - DNA, 120 bp, Homo sapiens
  misc_feature: 533 for SV(C|O) and mtDNA
atcaaccaaccacacctagcattcctgcacatctgtacccacgccttcttcaaagccatactatttatgtgctccgggtccatcatccacaaccttaacaatgaacaagatatccgaaaa

SEQ ID NO: 79634 - DNA, 120 bp, Homo sapiens
  misc_feature: 533 for SV(C|O) and mtDNA
caaatatcattctgaggggccacagtaattacaaacttactatccgccatcccatacattgggacagacctagttcaatgaatctgaggaggctactcagtagacagtcccaccctcaca

SEQ ID NO: 79635 - DNA, 120 bp, Homo sapiens; identical to SEQ ID NO: 59482
  misc_feature: 533 for SV(C|O) and mtDNA

SEQ ID NO: 79636 - DNA, 120 bp, Homo sapiens
  misc_feature: 533 for SV(C|O) and mtDNA
taatcacagcagtcctacttctcctatctctcccagtcctagctgctggcatcactatactactaacagaccgcaacctcaacaccaccttcttcgaccccgccggaggaggagacccca

SEQ ID NO: 79637 - DNA, 120 bp, Homo sapiens; identical to SEQ ID NO: 61154
  misc_feature: 533 for SV(C|O) and mtDNA

SEQ ID NO: 79638 - DNA, 120 bp, Homo sapiens
  misc_feature: 533 for SV(C|O) and mtDNA
ggttactagcacagagagttctcccagtaggttaatagtggggggtaaggcgaggttagcgaggcttgctagaagtcatcaaaaagctattagtgggagtagagtttgaagtccttgaga

SEQ ID NO: 79639 - DNA, 120 bp, Homo sapiens; identical to SEQ ID NO: 62436
  misc_feature: 533 for SV(C|O) and mtDNA

SEQ ID NO: 79640 - DNA, 120 bp, Homo sapiens
  misc_feature: 533 for SV(C|O) and mtDNA
taggctgccaatggtgagggaggttgaagtgagaggtatggttttgagtagtcctcctatttttcggatatcttgttcattgttaaggttgtggatgatggacccggagcacataaatag

SEQ ID NO: 79641 - DNA, 120 bp, Homo sapiens
  misc_feature: 533 for SV(C|O) and mtDNA
cttagcgctgtgatgagtgtgcctgcaaagatggtagagtagatgacgggttgggccaggggattaattagtacgggaagggtataaccaacattttcggggtatgggcccgatagctta

SEQ ID NO: 79642 - DNA, 120 bp, Homo sapiens; identical to SEQ ID NO: 53109
  misc_feature: 533 for SV(C|O) and mtDNA

SEQ ID NO: 79643 - DNA, 120 bp, Homo sapiens
  misc_feature: 533 for SV(C|O) and mtDNA
atctattactctcatcgctacctccctgacaagcgcctatagcactcgaataattcttctcaccctaacaggtcaacctcgcttccccacccttactaacattaacgaaaataaccccac

SEQ ID NO: 79644 - DNA, 120 bp, Homo sapiens
  misc_feature: 533 for SV(C|O) and mtDNA
agccctactccactcaagcactatagttgtagcaggaatcttcttactcatccgcttccaccccctagcagaaaatagcccactaatccaaactctaacactatgcttaggcgctatcac

SEQ ID NO: 79645 - DNA, 120 bp, Homo sapiens; identical to SEQ ID NO: 54068
  misc_feature: 533 for SV(C|O) and mtDNA

SEQ ID NO: 79646 - DNA, 120 bp, Homo sapiens
  misc_feature: 533 for SV(C|O) and mtDNA
agcctaattattagcatcatccctctactattttttaaccaaatcaacaacaacctatttagctgttccccaaccttttcctccgaccccctaacaacccccctcctaatactaactacc

SEQ ID NO: 79647 - DNA, 120 bp, Homo sapiens; identical to SEQ ID NO: 54533
  misc_feature: 533 for SV(C|O) and mtDNA

SEQ ID NO: 79648 - DNA, 120 bp, Homo sapiens
  misc_feature: 533 for SV(C|O) and mtDNA
gcatcatccctctactattttttaaccaaatcaacaacaacctatttagctgttccccaaccttttcctccgaccccctaacaacccccctcctaatactaactacctgactcctacccc

SEQ ID NO: 79649 - DNA, 120 bp, Homo sapiens
  misc_feature: 533 for SV(C|O) and mtDNA
atgcttaccgaacgaaaaattctaggctatatacaactacgcaaaggccccaacgttgtaggcccctacgggctactacaacccttcgctgacgccataaaactcttcaccaaagagccc

SEQ ID NO: 79650 - DNA, 120 bp, Homo sapiens
  misc_feature: 533 for SV(C|O) and mtDNA
ggcttaaaaacagatgcaattcccggacgtctaaaccaaaccactttcaccgctacacgaccgggggtatactacggtcaatgctctgaaatctgtggagcaaaccacagtttcatgccc

SEQ ID NO: 79651 - DNA, 120 bp, Homo sapiens; identical to SEQ ID NO: 58247
  misc_feature: 533 for SV(C|O) and mtDNA

SEQ ID NO: 79652 - DNA, 120 bp, Homo sapiens
  misc_feature: 533 for SV(C|O) and mtDNA
aatgcttaccgaacgaaaaattctaggctatatacaactacgcaaaggccccaacgttgtaggcccctacgggctactacaacccttcgctgacgccataaaactcttcaccaaagagcc

SEQ ID NO: 79653 - DNA, 120 bp, Homo sapiens
  misc_feature: 533 for SV(C|O) and mtDNA
gctccgggtccatcatccacaaccttaacaatgaacaagatatccgaaaaataggaggactactcaaaaccatacctctcacttcaacctccctcaccattggcagcctagcattagcag

SEQ ID NO: 79654 - DNA, 120 bp, Homo sapiens; identical to SEQ ID NO: 57499
  misc_feature: 533 for SV(C|O) and mtDNA

SEQ ID NO: 79655 - DNA, 120 bp, Homo sapiens
  misc_feature: 533 for SV(C|O) and mtDNA
gattcagccataatttacgtctcgagtgatgtgggcgattgatgaaaaggcggttgaggcgtctggtgagtagtgcatggctaggaatagtcctgtggtgatttggaggatcaggcaggc

SEQ ID NO: 79656 - DNA, 120 bp, Homo sapiens
  misc_feature: 533 for SV(C|O) and mtDNA
ctcccactaatagctttttgatgacttctagcaagcctcgctaacctcgccttaccccccactattaacctactgggagaactctctgtgctagtaaccacgttctcctgatcaaatatc

SEQ ID NO: 79657 - DNA, 120 bp, Homo sapiens
  misc_feature: 533 for SV(C|O) and mtDNA
ctaggaggcctgcccccgctaaccggctttttgcccaaatgggccattatcgaagaattcacaaaaaacaatagcctcatcatccccaccatcatagccaccatcaccctccttaacctc

SEQ ID NO: 79658 - DNA, 120 bp, Homo sapiens; identical to SEQ ID NO: 58185
  misc_feature: 533 for SV(C|O) and mtDNA

SEQ ID NO: 79659 - DNA, 120 bp, Homo sapiens
  misc_feature: 533 for SV(C|O) and mtDNA
acgcctgagccctatctattactctcatcgctacctccctgacaagcgcctatagcactcgaataattcttctcaccctaacaggtcaacctcgcttccccacccttactaacattaacg

SEQ ID NO: 79660 - DNA, 120 bp, Homo sapiens
  misc_feature: 533 for SV(C|O) and mtDNA
cccctcagataggggtcccttgaccaccatcctccgtgaaatcaatatcccgcacaagagtgctactctcctcgctccgggcccataacacttgggggtagctaaagtgaactgtatccg

SEQ ID NO: 79661 - DNA, 120 bp, Homo sapiens
  misc_feature: 533 for SV(C|O) and mtDNA
aggaatgctaggtgtggttggttgatgccgattgtaactattatgagtcctagttgacttgaagtggagaaggctacgatttttttgatgtcattttgtgtaagggcgcagactgctgcg

SEQ ID NO: 79662 - DNA, 120 bp, Homo sapiens
  misc_feature: 533 for SV(C|O) and mtDNA
aggaagtaaagtttaattatgcctttttgggttgaggtgatgatggaggtggagatttggtgctgtgaaattgttttaggtaatagcttttctagtcaggttaggtctaggaggagtagg

SEQ ID NO: 79663 - DNA, 120 bp, Homo sapiens
  misc_feature: 533 for SV(C|O) and mtDNA
acccggagcacataaatagtatggctttgaagaaggcgtgggtacagatgtgcaggaatgctaggtgtggttggttgatgccgattgtaactattatgagtcctagttgacttgaagtgg

SEQ ID NO: 79664 - DNA, 120 bp, Homo sapiens
  misc_feature: 533 for SV(C|O) and mtDNA
aaggcgggagaagccccggcaggtttgaagctgcttcttcgaatttgcaattcaatatgaaaatcacctcggagctggtaaaaagaggcctaacccctgtctttagatttacagtccaat

SEQ ID NO: 79665 - DNA, 120 bp, Homo sapiens
  misc_feature: 533 for SV(C|O) and mtDNA
agtcacagccctatactccctctacatatttaccacaacacaatggggctcactcacccaccacattaacaacataaaaccctcattcacacgagaaaacaccctcatgttcatacacct

SEQ ID NO: 79666 - DNA, 120 bp, Homo sapiens
  misc_feature: 533 for SV(C|O) and mtDNA
accttaacaatgaacaagatatccgaaaaataggaggactactcaaaaccatacctctcacttcaacctccctcaccattggcagcctagcattagcaggaatacctttcctcacaggtt

SEQ ID NO: 79667 - DNA, 120 bp, Homo sapiens
  misc_feature: 532 for SV(C|O) and mtDNA
ttgttaggtactgtttgcattaataaattaaagctccatagggtcttctcgtcttgctgtgtcatgcccgcctcttcacgggcaggtcaatttcactggttaaaagtaagagacagctga

SEQ ID NO: 79668 - DNA, 120 bp, Homo sapiens; identical to SEQ ID NO: 63059
  misc_feature: 532 for SV(C|O) and mtDNA

SEQ ID NO: 79669 - DNA, 120 bp, Homo sapiens
  misc_feature: 532 for SV(C|O) and mtDNA
tgggtgagtgagccccattgtgttgtggtaaatatgtagagggagtatagggctgtgactagtatgttgagtcctgtaagtaggagagtgatatttgatcaggagaacgtggttactagc

SEQ ID NO: 79670 - DNA, 120 bp, Homo sapiens; identical to SEQ ID NO: 54317
  misc_feature: 532 for SV(C|O) and mtDNA

SEQ ID NO: 79671 - DNA, 120 bp, Homo sapiens; identical to SEQ ID NO: 62762
  misc_feature: 532 for SV(C|O) and mtDNA

SEQ ID NO: 79672 - DNA, 120 bp, Homo sapiens; identical to SEQ ID NO: 58802
  misc_feature: 532 for SV(C|O) and mtDNA

SEQ ID NO: 79673 - DNA, 120 bp, Homo sapiens; identical to SEQ ID NO: 59284
  misc_feature: 532 for SV(C|O) and mtDNA

SEQ ID NO: 79674 - DNA, 120 bp, Homo sapiens
  misc_feature: 532 for SV(C|O) and mtDNA
tatacccccggtcgtgtagcggtgaaagtggtttggtttagacgtccgggaattgcatctgtttttaagcctaatgtggggacagctcatgagtgcaagacgtcttgtgatgtaattatt

SEQ ID NO: 79675 - DNA, 120 bp, Homo sapiens
  misc_feature: 532 for SV(C|O) and mtDNA
taatccaggtcggtttctatctacttcaaattcctccctgtacgaaaggacaagagaaataaggcctacttcacaaagcgccttcccccgtaaatgatatcatctcaacttagtattata

SEQ ID NO: 79676 - DNA, 120 bp, Homo sapiens
  misc_feature: 532 for SV(C|O) and mtDNA
acccacagcctaattattagcatcatccctctactattttttaaccaaatcaacaacaacctatttagctgttccccaaccttttcctccgaccccctaacaacccccctcctaatacta

SEQ ID NO: 79677 - DNA, 120 bp, Homo sapiens
  misc_feature: 532 for SV(C|O) and mtDNA
tagcatcatccctctactattttttaaccaaatcaacaacaacctatttagctgttccccaaccttttcctccgaccccctaacaacccccctcctaatactaactacctgactcctacc

SEQ ID NO: 79678 - DNA, 120 bp, Homo sapiens; identical to SEQ ID NO: 54476
  misc_feature: 532 for SV(C|O) and mtDNA

SEQ ID NO: 79679 - DNA, 120 bp, Homo sapiens
  misc_feature: 532 for SV(C|O) and mtDNA
taaggcgaaggggcctgcggcgtattcgatgttgaagcctgagactagttcggactctccttcggcaaggtcgaagggggttcggttggtctctgctagtgtggagataaatcatattat

SEQ ID NO: 79680 - DNA, 120 bp, Homo sapiens
  misc_feature: 532 for SV(C|O) and mtDNA
gtggttaatagggtgatagacctgtgatccatcgtgatgtcttatttaaggggaacgtgtgggctatttaggctttatggccctgaagtaggaaccagatgtcggatacagttcacttta

SEQ ID NO: 79681 - DNA, 120 bp, Homo sapiens
  misc_feature: 532 for SV(C|O) and mtDNA
agtcagctaaatactttgacgccggtggggatagcgatgattatggtagcggaggtgaaatatgctcgtgtgtctacgtctattcctactgtaaatatatggtgtgctcacacgataaac

SEQ ID NO: 79682 - DNA, 120 bp, Homo sapiens; identical to SEQ ID NO: 61402
  misc_feature: 532 for SV(C|O) and mtDNA

SEQ ID NO: 79683 - DNA, 120 bp, Homo sapiens
  misc_feature: 532 for SV(C|O) and mtDNA
gtgccagccaccgcggtcacacgattaacccaagtcaatagaagccggcgtaaagagtgttttagatcaccccctccccaataaagctaaaactcacctgagttgtaaaaaactccagct

SEQ ID NO: 79684 - DNA, 120 bp, Homo sapiens
  misc_feature: 532 for SV(C|O) and mtDNA
gtgcaagacgtcttgtgatgtaattattatacgaatgggggcttcaatcgggagtactactcgattgtcaacgtcaaggagtcgcaggtcgcctggttctaggaataatgggggaagtat

SEQ ID NO: 79685 - DNA, 120 bp, Homo sapiens
  misc_feature: 532 for SV(C|O) and mtDNA
aatccaggtcggtttctatctacttcaaattcctccctgtacgaaaggacaagagaaataaggcctacttcacaaagcgccttcccccgtaaatgatatcatctcaacttagtattatac

SEQ ID NO: 79686 - DNA, 120 bp, Homo sapiens; identical to SEQ ID NO: 61961
  misc_feature: 532 for SV(C|O) and mtDNA

SEQ ID NO: 79687 - DNA, 120 bp, Homo sapiens
  misc_feature: 532 for SV(C|O) and mtDNA
gcggcttcgaccctatatcccccgcccgcgtccctttctccataaaattcttcttagtagctattaccttcttattatttgatctagaaattgccctccttttacccctaccatgagccc

SEQ ID NO: 79688 - DNA, 120 bp, Homo sapiens
  misc_feature: 532 for SV(C|O) and mtDNA
gcttagcgctgtgatgagtgtgcctgcaaagatggtagagtagatgacgggttgggccaggggattaattagtacgggaagggtataaccaacattttcggggtatgggcccgatagctt

SEQ ID NO: 79689 - DNA, 120 bp, Homo sapiens; identical to SEQ ID NO: 61795
  misc_feature: 532 for SV(C|O) and mtDNA

SEQ ID NO: 79690 - DNA, 120 bp, Homo sapiens
  misc_feature: 532 for SV(C|O) and mtDNA
gcaggcggcaaagactagtatggcaataggcacaatattggctaagagggagtgggtgttgagggttatgagagtagctataatgaacagtgatagtattattccttctaggcatagtag

SEQ ID NO: 79691 - DNA, 120 bp, Homo sapiens
  misc_feature: 532 for SV(C|O) and mtDNA
aactctactcccactaatagctttttgatgacttctagcaagcctcgctaacctcgccttaccccccactattaacctactgggagaactctctgtgctagtaaccacgttctcctgatc

SEQ ID NO: 79692 - DNA, 120 bp, Homo sapiens
  misc_feature: 532 for SV(C|O) and mtDNA
gagtggttaatagggtgatagacctgtgatccatcgtgatgtcttatttaaggggaacgtgtgggctatttaggctttatggccctgaagtaggaaccagatgtcggatacagttcactt

SEQ ID NO: 79693 - DNA, 120 bp, Homo sapiens
  misc_feature: 532 for SV(C|O) and mtDNA
gaagtaaagtttaattatgcctttttgggttgaggtgatgatggaggtggagatttggtgctgtgaaattgttttaggtaatagcttttctagtcaggttaggtctaggaggagtagggg

SEQ ID NO: 79694 - DNA, 120 bp, Homo sapiens
  misc_feature: 532 for SV(C|O) and mtDNA
acaaccttaacaatgaacaagatatccgaaaaataggaggactactcaaaaccatacctctcacttcaacctccctcaccattggcagcctagcattagcaggaatacctttcctcacag

SEQ ID NO: 79695 - DNA, 120 bp, Homo sapiens; identical to SEQ ID NO: 63044
  misc_feature: 532 for SV(C|O) and mtDNA

SEQ ID NO: 79696 - DNA, 120 bp, Homo sapiens
  misc_feature: 532 for SV(C|O) and mtDNA
cgtttcgtgcaagaataggaggtggagtgctgctagggctgcaataatgaagggcaagatgaagtgaaaggtaaagaatcgtgtgagggtgggactgtctactgagtagcctcctcagat

SEQ ID NO: 79697 - DNA, 120 bp, Homo sapiens
  misc_feature: 532 for SV(C|O) and mtDNA
ccactaatagctttttgatgacttctagcaagcctcgctaacctcgccttaccccccactattaacctactgggagaactctctgtgctagtaaccacgttctcctgatcaaatatcact

SEQ ID NO: 79698 - DNA, 120 bp, Homo sapiens
  misc_feature: 532 for SV(C|O) and mtDNA
aatatgtagagggagtatagggctgtgactagtatgttgagtcctgtaagtaggagagtgatatttgatcaggagaacgtggttactagcacagagagttctcccagtaggttaatagtg

SEQ ID NO: 79699 - DNA, 120 bp, Homo sapiens; identical to SEQ ID NO: 57161
  misc_feature: 532 for SV(C|O) and mtDNA

SEQ ID NO: 79700 - DNA, 120 bp, Homo sapiens
  misc_feature: 531 for SV(C|O) and mtDNA
tttaggggaattaattctaggacgatgggcatgaaactgtggtttgctccacagatttcagagcattgaccgtagtatacccccggtcgtgtagcggtgaaagtggtttggtttagacgt

SEQ ID NO: 79701 - DNA, 120 bp, Homo sapiens
  misc_feature: 531 for SV(C|O) and mtDNA
ccgggtccatcatccacaaccttaacaatgaacaagatatccgaaaaataggaggactactcaaaaccatacctctcacttcaacctccctcaccattggcagcctagcattagcaggaa

SEQ ID NO: 79702 - DNA, 120 bp, Homo sapiens; identical to SEQ ID NO: 59342
  misc_feature: 531 for SV(C|O) and mtDNA

SEQ ID NO: 79703 - DNA, 120 bp, Homo sapiens
  misc_feature: 531 for SV(C|O) and mtDNA
actctactcccactaatagctttttgatgacttctagcaagcctcgctaacctcgccttaccccccactattaacctactgggagaactctctgtgctagtaaccacgttctcctgatca

SEQ ID NO: 79704 - DNA, 120 bp, Homo sapiens
  misc_feature: 531 for SV(C|O) and mtDNA
tgagttggtcgtagcggaatcgggggtatgctgttcgaattcataagaacagggaggttagaagtagggtcttggtgacaaaatatgttgtgtagagttcaggggagagtgcgtcatatg

SEQ ID NO: 79705 - DNA, 120 bp, Homo sapiens
  misc_feature: 531 for SV(C|O) and mtDNA
atattgaggcgccattggcgtgaaggtagcggatgattcagccataatttacgtctcgagtgatgtgggcgattgatgaaaaggcggttgaggcgtctggtgagtagtgcatggctagga

SEQ ID NO: 79706 - DNA, 120 bp, Homo sapiens
  misc_feature: 531 for SV(C|O) and mtDNA
acgaaacgggatcaaacaaccccctaggaatcacctcccattccgataaaatcaccttccacccttactacacaatcaaagacgccctcggcttacttctcttccttctctccttaatga

SEQ ID NO: 79707 - DNA, 120 bp, Homo sapiens
  misc_feature: 531 for SV(C|O) and mtDNA
gtcacagccctatactccctctacatatttaccacaacacaatggggctcactcacccaccacattaacaacataaaaccctcattcacacgagaaaacaccctcatgttcatacaccta

SEQ ID NO: 79708 - DNA, 120 bp, Homo sapiens
  misc_feature: 531 for SV(C|O) and mtDNA
aaatatcattctgaggggccacagtaattacaaacttactatccgccatcccatacattgggacagacctagttcaatgaatctgaggaggctactcagtagacagtcccaccctcacac

SEQ ID NO: 79709 - DNA, 120 bp, Homo sapiens
  misc_feature: 531 for SV(C|O) and mtDNA
cagcctaattattagcatcatccctctactattttttaaccaaatcaacaacaacctatttagctgttccccaaccttttcctccgaccccctaacaacccccctcctaatactaactac

SEQ ID NO: 79710 - DNA, 120 bp, Homo sapiens
  misc_feature: 531 for SV(C|O) and mtDNA
cctaatcacagcagtcctacttctcctatctctcccagtcctagctgctggcatcactatactactaacagaccgcaacctcaacaccaccttcttcgaccccgccggaggaggagaccc

SEQ ID NO: 79711 - DNA, 120 bp, Homo sapiens
  misc_feature: 531 for SV(C|O) and mtDNA
ggctatgaagaataaggcgaaggggcctgcggcgtattcgatgttgaagcctgagactagttcggactctccttcggcaaggtcgaagggggttcggttggtctctgctagtgtggagat

SEQ ID NO: 79712 - DNA, 120 bp, Homo sapiens
  misc_feature: 531 for SV(C|O) and mtDNA
aatgtttgtgtattcggctatgaagaataaggcgaaggggcctgcggcgtattcgatgttgaagcctgagactagttcggactctccttcggcaaggtcgaagggggttcggttggtctc

SEQ ID NO: 79713 - DNA, 120 bp, Homo sapiens; identical to SEQ ID NO: 56261
  misc_feature: 531 for SV(C|O) and mtDNA

SEQ ID NO: 79714 - DNA, 120 bp, Homo sapiens
  misc_feature: 531 for SV(C|O) and mtDNA
accaaccacacctagcattcctgcacatctgtacccacgccttcttcaaagccatactatttatgtgctccgggtccatcatccacaaccttaacaatgaacaagatatccgaaaaatag

SEQ ID NO: 79715 - DNA, 120 bp, Homo sapiens
  misc_feature: 531 for SV(C|O) and mtDNA
agagctcccgtgagtggttaatagggtgatagacctgtgatccatcgtgatgtcttatttaaggggaacgtgtgggctatttaggctttatggccctgaagtaggaaccagatgtcggat

SEQ ID NO: 79716 - DNA, 120 bp, Homo sapiens
  misc_feature: 531 for SV(C|O) and mtDNA
agtggttaatagggtgatagacctgtgatccatcgtgatgtcttatttaaggggaacgtgtgggctatttaggctttatggccctgaagtaggaaccagatgtcggatacagttcacttt

SEQ ID NO: 79717 - DNA, 120 bp, Homo sapiens
  misc_feature: 531 for SV(C|O) and mtDNA
aatccaaaattctccgtgccacctatcacaccccatcctaaagtaaggtcagctaaataagctatcgggcccataccccgaaaatgttggttatacccttcccgtactaattaatcccct

SEQ ID NO: 79718 - DNA, 120 bp, Homo sapiens
  misc_feature: 531 for SV(C|O) and mtDNA
aatcagcccaattaggtctccacccctgactcccctcagccatagaaggccccaccccagtctcagccctactccactcaagcactatagttgtagcaggaatcttcttactcatccgct

SEQ ID NO: 79719 - DNA, 120 bp, Homo sapiens
  misc_feature: 530 for SV(C|O) and mtDNA
gagctgtccccacattaggcttaaaaacagatgcaattcccggacgtctaaaccaaaccactttcaccgctacacgaccgggggtatactacggtcaatgctctgaaatctgtggagcaa

SEQ ID NO: 79720 - DNA, 120 bp, Homo sapiens
  misc_feature: 530 for SV(C|O) and mtDNA
tattgaggcgccattggcgtgaaggtagcggatgattcagccataatttacgtctcgagtgatgtgggcgattgatgaaaaggcggttgaggcgtctggtgagtagtgcatggctaggaa

SEQ ID NO: 79721 - DNA, 120 bp, Homo sapiens; identical to SEQ ID NO: 61379
  misc_feature: 530 for SV(C|O) and mtDNA

SEQ ID NO: 79722 - DNA, 120 bp, Homo sapiens
  misc_feature: 530 for SV(C|O) and mtDNA
tgttttagatcaccccctccccaataaagctaaaactcacctgagttgtaaaaaactccagctgacacaaaatagactacgaaagtggctttaacatatctgaacacacaatagctaaga

SEQ ID NO: 79723 - DNA, 120 bp, Homo sapiens
  misc_feature: 530 for SV(C|O) and mtDNA
accaacacctattctgatttttcggtcaccctgaagtttatattcttatcctaccaggcttcggaataatctcccatattgtaacttactactccggaaaaaaagaaccatttggataca

SEQ ID NO: 79724 - DNA, 120 bp, Homo sapiens; identical to SEQ ID NO: 60290
  misc_feature: 530 for SV(C|O) and mtDNA

SEQ ID NO: 79725 - DNA, 120 bp, Homo sapiens
  misc_feature: 530 for SV(C|O) and mtDNA
ccctcagataggggtcccttgaccaccatcctccgtgaaatcaatatcccgcacaagagtgctactctcctcgctccgggcccataacacttgggggtagctaaagtgaactgtatccga

SEQ ID NO: 79726 - DNA, 120 bp, Homo sapiens
  misc_feature: 530 for SV(C|O) and mtDNA
tcgagataataacttcttggtctaggcacatgaatattgttgtggggaagagactgataataaaggtggatgcgacaatggattttacataatgggggtatgagttttttttgttagggt

SEQ ID NO: 79727 - DNA, 120 bp, Homo sapiens
  misc_feature: 530 for SV(C|O) and mtDNA
catgcctcaggatactcctcaatagccatcgctgtagtatatccaaagacaaccatcattccccctaaataaattaaaaaaactattaaacccatataacctcccccaaaattcagaata

SEQ ID NO: 79728 - DNA, 120 bp, Homo sapiens
  misc_feature: 530 for SV(C|O) and mtDNA
tagtatggctttgaagaaggcgtgggtacagatgtgcaggaatgctaggtgtggttggttgatgccgattgtaactattatgagtcctagttgacttgaagtggagaaggctacgatttt

SEQ ID NO: 79729 - DNA, 120 bp, Homo sapiens; identical to SEQ ID NO: 61259
  misc_feature: 530 for SV(C|O) and mtDNA

SEQ ID NO: 79730 - DNA, 120 bp, Homo sapiens; identical to SEQ ID NO: 56409
  misc_feature: 530 for SV(C|O) and mtDNA

SEQ ID NO: 79731 - DNA, 120 bp, Homo sapiens
  misc_feature: 530 for SV(C|O) and mtDNA
caagacgtcttgtgatgtaattattatacgaatgggggcttcaatcgggagtactactcgattgtcaacgtcaaggagtcgcaggtcgcctggttctaggaataatgggggaagtatgta

SEQ ID NO: 79732 - DNA, 120 bp, Homo sapiens
  misc_feature: 530 for SV(C|O) and mtDNA
ctattagtgggagtagagtttgaagtccttgagagaggattatgatgcgactgtgagtgcgttcgtagtttgagtttgctaggcagaatagtaatgaggatgtaagtccgtgggcgatta

SEQ ID NO: 79733 - DNA, 120 bp, Homo sapiens; identical to SEQ ID NO: 59117
  misc_feature: 530 for SV(C|O) and mtDNA

SEQ ID NO: 79734 - DNA, 120 bp, Homo sapiens
  misc_feature: 530 for SV(C|O) and mtDNA
gtggccttggtatgtgctttctcgtgttacatcgcgccatcattggtatatggttagtgtgttggttagtaggcctagtatgaggagcgttatggagtggaagtgaaatcacatggctag

SEQ ID NO: 79735 - DNA, 120 bp, Homo sapiens; identical to SEQ ID NO: 59350
  misc_feature: 530 for SV(C|O) and mtDNA

SEQ ID NO: 79736 - DNA, 120 bp, Homo sapiens
  misc_feature: 530 for SV(C|O) and mtDNA
ccctccttaacctctacttctacctacgcctaatctactccacctcaatcacactactccccatatctaacaacgtaaaaataaaatgacagtttgaacatacaaaacccaccccattcc

SEQ ID NO: 79737 - DNA, 120 bp, Homo sapiens; identical to SEQ ID NO: 60523
  misc_feature: 530 for SV(C|O) and mtDNA

SEQ ID NO: 79738 - DNA, 120 bp, Homo sapiens
  misc_feature: 530 for SV(C|O) and mtDNA
gcacgaaacgggatcaaacaaccccctaggaatcacctcccattccgataaaatcaccttccacccttactacacaatcaaagacgccctcggcttacttctcttccttctctccttaat

SEQ ID NO: 79739 - DNA, 120 bp, Homo sapiens; identical to SEQ ID NO: 54505
  misc_feature: 530 for SV(C|O) and mtDNA

SEQ ID NO: 79740 - DNA, 120 bp, Homo sapiens; identical to SEQ ID NO: 57461
  misc_feature: 530 for SV(C|O) and mtDNA

SEQ ID NO: 79741 - DNA, 120 bp, Homo sapiens
  misc_feature: 530 for SV(C|O) and mtDNA
gaatgggggcttcaatcgggagtactactcgattgtcaacgtcaaggagtcgcaggtcgcctggttctaggaataatgggggaagtatgtaggagttgaagattagtccgccgtagtcgg

SEQ ID NO: 79742 - DNA, 120 bp, Homo sapiens; identical to SEQ ID NO: 60624
  misc_feature: 530 for SV(C|O) and mtDNA

SEQ ID NO: 79743 - DNA, 120 bp, Homo sapiens
  misc_feature: 530 for SV(C|O) and mtDNA
cgggtccatcatccacaaccttaacaatgaacaagatatccgaaaaataggaggactactcaaaaccatacctctcacttcaacctccctcaccattggcagcctagcattagcaggaat

SEQ ID NO: 79744 - DNA, 120 bp, Homo sapiens
  misc_feature: 530 for SV(C|O) and mtDNA
accacacctagcattcctgcacatctgtacccacgccttcttcaaagccatactatttatgtgctccgggtccatcatccacaaccttaacaatgaacaagatatccgaaaaataggagg

SEQ ID NO: 79745 - DNA, 120 bp, Homo sapiens
  misc_feature: 530 for SV(C|O) and mtDNA
cagtttcatgcccatcgtcctagaattaattcccctaaaaatctttgaaatagggcccgtatttaccctatagcaccccctctaccccctctagagcccactgtaaagctaacttagcat

SEQ ID NO: 79746 - DNA, 120 bp, Homo sapiens
  misc_feature: 530 for SV(C|O) and mtDNA
actcaggtgagttttagctttattggggagggggtgatctaaaacactctttacgccggcttctattgacttgggttaatcgtgtgaccgcggtggctggcacgaaattgaccaaccctg

SEQ ID NO: 79747 - DNA, 120 bp, Homo sapiens
  misc_feature: 530 for SV(C|O) and mtDNA
aaaaacagatgcaattcccggacgtctaaaccaaaccactttcaccgctacacgaccgggggtatactacggtcaatgctctgaaatctgtggagcaaaccacagtttcatgcccatcgt

SEQ ID NO: 79748 - DNA, 120 bp, Homo sapiens; identical to SEQ ID NO: 57394
  misc_feature: 529 for SV(C|O) and mtDNA

SEQ ID NO: 79749 - DNA, 120 bp, Homo sapiens
  misc_feature: 529 for SV(C|O) and mtDNA
tatactaaccccagggttggtcaatttcgtgccagccaccgcggtcacacgattaacccaagtcaatagaagccggcgtaaagagtgttttagatcaccccctccccaataaagctaaaa

SEQ ID NO: 79750 - DNA, 120 bp, Homo sapiens; identical to SEQ ID NO: 57192
  misc_feature: 529 for SV(C|O) and mtDNA

SEQ ID NO: 79751 - DNA, 120 bp, Homo sapiens
  misc_feature: 529 for SV(C|O) and mtDNA
tgtttgtgtattcggctatgaagaataaggcgaaggggcctgcggcgtattcgatgttgaagcctgagactagttcggactctccttcggcaaggtcgaagggggttcggttggtctctg

SEQ ID NO: 79752 - DNA, 120 bp, Homo sapiens
  misc_feature: 529 for SV(C|O) and mtDNA
acctaaaactcacagccctcgctgtcactttcctaggacttctaacagccctagacctcaactacctaaccaacaaacttaaaataaaatccccactatgcacattttatttctccaaca

SEQ ID NO: 79753 - DNA, 120 bp, Homo sapiens; identical to SEQ ID NO: 58409
  misc_feature: 529 for SV(C|O) and mtDNA

SEQ ID NO: 79754 - DNA, 120 bp, Homo sapiens
  misc_feature: 529 for SV(C|O) and mtDNA
tgggggcttcaatcgggagtactactcgattgtcaacgtcaaggagtcgcaggtcgcctggttctaggaataatgggggaagtatgtaggagttgaagattagtccgccgtagtcggtgt

SEQ ID NO: 79755 - DNA, 120 bp, Homo sapiens
  misc_feature: 529 for SV(C|O) and mtDNA
gatgattcagccataatttacgtctcgagtgatgtgggcgattgatgaaaaggcggttgaggcgtctggtgagtagtgcatggctaggaatagtcctgtggtgatttggaggatcaggca

SEQ ID NO: 79756 - DNA, 120 bp, Homo sapiens
  misc_feature: 529 for SV(C|O) and mtDNA
tgccagccaccgcggtcacacgattaacccaagtcaatagaagccggcgtaaagagtgttttagatcaccccctccccaataaagctaaaactcacctgagttgtaaaaaactccagctg

SEQ ID NO: 79757 - DNA, 120 bp, Homo sapiens; identical to SEQ ID NO: 60379
  misc_feature: 529 for SV(C|O) and mtDNA

SEQ ID NO: 79758 - DNA, 120 bp, Homo sapiens; identical to SEQ ID NO: 62706
  misc_feature: 529 for SV(C|O) and mtDNA

SEQ ID NO: 79759 - DNA, 120 bp, Homo sapiens
  misc_feature: 529 for SV(C|O) and mtDNA
aaccaaccacacctagcattcctgcacatctgtacccacgccttcttcaaagccatactatttatgtgctccgggtccatcatccacaaccttaacaatgaacaagatatccgaaaaata

SEQ ID NO: 79760 - DNA, 120 bp, Homo sapiens
  misc_feature: 529 for SV(C|O) and mtDNA
ggcggactaatcttcaactcctacatacttcccccattattcctagaaccaggcgacctgcgactccttgacgttgacaatcgagtagtactcccgattgaagcccccattcgtataata

SEQ ID NO: 79761 - DNA, 120 bp, Homo sapiens
  misc_feature: 529 for SV(C|O) and mtDNA
ggtgagtgagccccattgtgttgtggtaaatatgtagagggagtatagggctgtgactagtatgttgagtcctgtaagtaggagagtgatatttgatcaggagaacgtggttactagcac

SEQ ID NO: 79762 - DNA, 120 bp, Homo sapiens; identical to SEQ ID NO: 61579
  misc_feature: 529 for SV(C|O) and mtDNA

SEQ ID NO: 79763 - DNA, 120 bp, Homo sapiens
  misc_feature: 529 for SV(C|O) and mtDNA
gtaatccaggtcggtttctatctacttcaaattcctccctgtacgaaaggacaagagaaataaggcctacttcacaaagcgccttcccccgtaaatgatatcatctcaacttagtattat

SEQ ID NO: 79764 - DNA, 120 bp, Homo sapiens
  misc_feature: 529 for SV(C|O) and mtDNA
ctattactctcatcgctacctccctgacaagcgcctatagcactcgaataattcttctcaccctaacaggtcaacctcgcttccccacccttactaacattaacgaaaataaccccaccc

SEQ ID NO: 79765 - DNA, 120 bp, Homo sapiens
  misc_feature: 529 for SV(C|O) and mtDNA
accaatggtactgaacctacgagtacaccgactacggcggactaatcttcaactcctacatacttcccccattattcctagaaccaggcgacctgcgactccttgacgttgacaatcgag

SEQ ID NO: 79766 - DNA, 120 bp, Homo sapiens
  misc_feature: 529 for SV(C|O) and mtDNA
cgagataataacttcttggtctaggcacatgaatattgttgtggggaagagactgataataaaggtggatgcgacaatggattttacataatgggggtatgagttttttttgttagggtt

SEQ ID NO: 79767 - DNA, 120 bp, Homo sapiens
  misc_feature: 529 for SV(C|O) and mtDNA
atccgtcctaatcacagcagtcctacttctcctatctctcccagtcctagctgctggcatcactatactactaacagaccgcaacctcaacaccaccttcttcgaccccgccggaggagg

SEQ ID NO: 79768 - DNA, 120 bp, Homo sapiens
  misc_feature: 529 for SV(C|O) and mtDNA
ccatgcctcaggatactcctcaatagccatcgctgtagtatatccaaagacaaccatcattccccctaaataaattaaaaaaactattaaacccatataacctcccccaaaattcagaat

SEQ ID NO: 79769 - DNA, 120 bp, Homo sapiens
  misc_feature: 529 for SV(C|O) and mtDNA
aggcgggagaagccccggcaggtttgaagctgcttcttcgaatttgcaattcaatatgaaaatcacctcggagctggtaaaaagaggcctaacccctgtctttagatttacagtccaatg

SEQ ID NO: 79770 - DNA, 120 bp, Homo sapiens
  misc_feature: 529 for SV(C|O) and mtDNA
cacgaaacgggatcaaacaaccccctaggaatcacctcccattccgataaaatcaccttccacccttactacacaatcaaagacgccctcggcttacttctcttccttctctccttaatg

SEQ ID NO: 79771 - DNA, 120 bp, Homo sapiens
  misc_feature: 529 for SV(C|O) and mtDNA
caggtgcgagatagtagtagggtcgtggtgctggagtttaagttgagtagtaggaatgcggtagtagttaggataatataaatagttaaattaagaatggttatgttagggttgtacggt

SEQ ID NO: 79772 - DNA, 120 bp, Homo sapiens
  misc_feature: 529 for SV(C|O) and mtDNA
aaatagtatggctttgaagaaggcgtgggtacagatgtgcaggaatgctaggtgtggttggttgatgccgattgtaactattatgagtcctagttgacttgaagtggagaaggctacgat

SEQ ID NO: 79773 - DNA, 120 bp, Homo sapiens
  misc_feature: 528 for SV(C|O) and mtDNA
ttttggctcgtaagaaggcctagataggggattgtgcggtgtgtgatggtagggtagaatccgagtatgttggagaaataaaatgtgcatagtggggattttattttaagtttgttggtt

SEQ ID NO: 79774 - DNA, 120 bp, Homo sapiens; identical to SEQ ID NO: 62712
  misc_feature: 528 for SV(C|O) and mtDNA

SEQ ID NO: 79775 - DNA, 120 bp, Homo sapiens
  misc_feature: 528 for SV(C|O) and mtDNA
cgtgaggccaaatatcattctgaggggccacagtaattacaaacttactatccgccatcccatacattgggacagacctagttcaatgaatctgaggaggctactcagtagacagtccca

SEQ ID NO: 79776 - DNA, 120 bp, Homo sapiens; identical to SEQ ID NO: 54083
  misc_feature: 528 for SV(C|O) and mtDNA

SEQ ID NO: 79777 - DNA, 120 bp, Homo sapiens; identical to SEQ ID NO: 59065
  misc_feature: 528 for SV(C|O) and mtDNA

SEQ ID NO: 79778 - DNA, 120 bp, Homo sapiens
  misc_feature: 528 for SV(C|O) and mtDNA
aaggtcagctaaataagctatcgggcccataccccgaaaatgttggttatacccttcccgtactaattaatcccctggcccaacccgtcatctactctaccatctttgcaggcacactca

SEQ ID NO: 79779 - DNA, 120 bp, Homo sapiens; identical to SEQ ID NO: 54467
  misc_feature: 528 for SV(C|O) and mtDNA

SEQ ID NO: 79780 - DNA, 120 bp, Homo sapiens; identical to SEQ ID NO: 57741
  misc_feature: 528 for SV(C|O) and mtDNA

SEQ ID NO: 79781 - DNA, 120 bp, Homo sapiens; identical to SEQ ID NO: 59017
  misc_feature: 528 for SV(C|O) and mtDNA

SEQ ID NO: 79782 - DNA, 120 bp, Homo sapiens
  misc_feature: 528 for SV(C|O) and mtDNA
tattagtgggagtagagtttgaagtccttgagagaggattatgatgcgactgtgagtgcgttcgtagtttgagtttgctaggcagaatagtaatgaggatgtaagtccgtgggcgattat

SEQ ID NO: 79783 - DNA, 120 bp, Homo sapiens
  misc_feature: 528 for SV(C|O) and mtDNA
tatgagttggtcgtagcggaatcgggggtatgctgttcgaattcataagaacagggaggttagaagtagggtcttggtgacaaaatatgttgtgtagagttcaggggagagtgcgtcata

SEQ ID NO: 79784 - DNA, 120 bp, Homo sapiens
  misc_feature: 528 for SV(C|O) and mtDNA
gagctcccgtgagtggttaatagggtgatagacctgtgatccatcgtgatgtcttatttaaggggaacgtgtgggctatttaggctttatggccctgaagtaggaaccagatgtcggata

SEQ ID NO: 79785 - DNA, 120 bp, Homo sapiens
  misc_feature: 528 for SV(C|O) and mtDNA
tatacgaatgggggcttcaatcgggagtactactcgattgtcaacgtcaaggagtcgcaggtcgcctggttctaggaataatgggggaagtatgtaggagttgaagattagtccgccgta

SEQ ID NO: 79786 - DNA, 120 bp, Homo sapiens
  misc_feature: 528 for SV(C|O) and mtDNA
taggcttaaaaacagatgcaattcccggacgtctaaaccaaaccactttcaccgctacacgaccgggggtatactacggtcaatgctctgaaatctgtggagcaaaccacagtttcatgc

SEQ ID NO: 79787 - DNA, 120 bp, Homo sapiens
  misc_feature: 528 for SV(C|O) and mtDNA
taataatgtttgtgtattcggctatgaagaataaggcgaaggggcctgcggcgtattcgatgttgaagcctgagactagttcggactctccttcggcaaggtcgaagggggttcggttgg

SEQ ID NO: 79788 - DNA, 120 bp, Homo sapiens
  misc_feature: 528 for SV(C|O) and mtDNA
taaacgaaagtttaactaagctatactaaccccagggttggtcaatttcgtgccagccaccgcggtcacacgattaacccaagtcaatagaagccggcgtaaagagtgttttagatcacc

SEQ ID NO: 79789 - DNA, 120 bp, Homo sapiens
  misc_feature: 528 for SV(C|O) and mtDNA
agaagaccctatggagctttaatttattaatgcaaacagtacctaacaaacccacaggtcctaaactaccaaacctgcattaaaaatttcggttggggcgacctcggagcagaacccaac

SEQ ID NO: 79790 - DNA, 120 bp, Homo sapiens
  misc_feature: 528 for SV(C|O) and mtDNA
agctcccgtgagtggttaatagggtgatagacctgtgatccatcgtgatgtcttatttaaggggaacgtgtgggctatttaggctttatggccctgaagtaggaaccagatgtcggatac

SEQ ID NO: 79791 - DNA, 120 bp, Homo sapiens
  misc_feature: 528 for SV(C|O) and mtDNA
gtaaagtttaattatgcctttttgggttgaggtgatgatggaggtggagatttggtgctgtgaaattgttttaggtaatagcttttctagtcaggttaggtctaggaggagtaggggcag

SEQ ID NO: 79792 - DNA, 120 bp, Homo sapiens
  misc_feature: 528 for SV(C|O) and mtDNA
gggaagaagaaagagaggaagtaaagtttaattatgcctttttgggttgaggtgatgatggaggtggagatttggtgctgtgaaattgttttaggtaatagcttttctagtcaggttagg

SEQ ID NO: 79793 - DNA, 120 bp, Homo sapiens; identical to SEQ ID NO: 54231
  misc_feature: 528 for SV(C|O) and mtDNA

SEQ ID NO: 79794 - DNA, 120 bp, Homo sapiens
  misc_feature: 528 for SV(C|O) and mtDNA
cccgtgaggccaaatatcattctgaggggccacagtaattacaaacttactatccgccatcccatacattgggacagacctagttcaatgaatctgaggaggctactcagtagacagtcc

SEQ ID NO: 79795 - DNA, 120 bp, Homo sapiens; identical to SEQ ID NO: 62995
  misc_feature: 528 for SV(C|O) and mtDNA

SEQ ID NO: 79796 - DNA, 120 bp, Homo sapiens
  misc_feature: 528 for SV(C|O) and mtDNA
gattattaggggaactagtcagttgccaaagcctccgattatgatgggtattactatgaagaagattattacaaatgcatgggctgtgacgataacgttgtagatgtggtcgttacctag

SEQ ID NO: 79797 - DNA, 120 bp, Homo sapiens
  misc_feature: 528 for SV(C|O) and mtDNA
gaagttttttcataggaggtgtatgagttggtcgtagcggaatcgggggtatgctgttcgaattcataagaacagggaggttagaagtagggtcttggtgacaaaatatgttgtgtagag

SEQ ID NO: 79798 - DNA, 120 bp, Homo sapiens
  misc_feature: 528 for SV(C|O) and mtDNA
atgattcagccataatttacgtctcgagtgatgtgggcgattgatgaaaaggcggttgaggcgtctggtgagtagtgcatggctaggaatagtcctgtggtgatttggaggatcaggcag

SEQ ID NO: 79799 - DNA, 120 bp, Homo sapiens; identical to SEQ ID NO: 56589
  misc_feature: 528 for SV(C|O) and mtDNA

SEQ ID NO: 79800 - DNA, 120 bp, Homo sapiens
  misc_feature: 528 for SV(C|O) and mtDNA
cgagcttagcgctgtgatgagtgtgcctgcaaagatggtagagtagatgacgggttgggccaggggattaattagtacgggaagggtataaccaacattttcggggtatgggcccgatag

SEQ ID NO: 79801 - DNA, 120 bp, Homo sapiens
  misc_feature: 528 for SV(C|O) and mtDNA
cattctataccaacacctattctgatttttcggtcaccctgaagtttatattcttatcctaccaggcttcggaataatctcccatattgtaacttactactccggaaaaaaagaaccatt

SEQ ID NO: 79802 - DNA, 120 bp, Homo sapiens; identical to SEQ ID NO: 58129
  misc_feature: 528 for SV(C|O) and mtDNA

SEQ ID NO: 79803 - DNA, 120 bp, Homo sapiens
  misc_feature: 528 for SV(C|O) and mtDNA
aaccacagtttcatgcccatcgtcctagaattaattcccctaaaaatctttgaaatagggcccgtatttaccctatagcaccccctctaccccctctagagcccactgtaaagctaactt

SEQ ID NO: 79804 - DNA, 120 bp, Homo sapiens
  misc_feature: 527 for SV(C|O) and mtDNA
ttttaggggaattaattctaggacgatgggcatgaaactgtggtttgctccacagatttcagagcattgaccgtagtatacccccggtcgtgtagcggtgaaagtggtttggtttagacg

SEQ ID NO: 79805 - DNA, 120 bp, Homo sapiens
  misc_feature: 527 for SV(C|O) and mtDNA
gaaggggcctgcggcgtattcgatgttgaagcctgagactagttcggactctccttcggcaaggtcgaagggggttcggttggtctctgctagtgtggagataaatcatattatggccaa

SEQ ID NO: 79806 - DNA, 120 bp, Homo sapiens; identical to SEQ ID NO: 60396
  misc_feature: 527 for SV(C|O) and mtDNA

SEQ ID NO: 79807 - DNA, 120 bp, Homo sapiens
  misc_feature: 527 for SV(C|O) and mtDNA
ttagcatcatccctctactattttttaaccaaatcaacaacaacctatttagctgttccccaaccttttcctccgaccccctaacaacccccctcctaatactaactacctgactcctac

SEQ ID NO: 79808 - DNA, 120 bp, Homo sapiens; identical to SEQ ID NO: 57031
  misc_feature: 527 for SV(C|O) and mtDNA

SEQ ID NO: 79809 - DNA, 120 bp, Homo sapiens
  misc_feature: 527 for SV(C|O) and mtDNA
agtaagattacacatgcaagcatccccgttccagtgagttcaccctctaaatcaccacgatcaaaagggacaagcatcaagcacgcagcaatgcagctcaaaacgcttagcctagccaca

SEQ ID NO: 79810 - DNA, 120 bp, Homo sapiens; identical to SEQ ID NO: 57925
  misc_feature: 527 for SV(C|O) and mtDNA

SEQ ID NO: 79811 - DNA, 120 bp, Homo sapiens
  misc_feature: 527 for SV(C|O) and mtDNA
ggaagttttttcataggaggtgtatgagttggtcgtagcggaatcgggggtatgctgttcgaattcataagaacagggaggttagaagtagggtcttggtgacaaaatatgttgtgtaga

SEQ ID NO: 79812 - DNA, 120 bp, Homo sapiens; identical to SEQ ID NO: 62251
  misc_feature: 527 for SV(C|O) and mtDNA

SEQ ID NO: 79813 - DNA, 120 bp, Homo sapiens; identical to SEQ ID NO: 59522
  misc_feature: 527 for SV(C|O) and mtDNA

SEQ ID NO: 79814 - DNA, 120 bp, Homo sapiens; identical to SEQ ID NO: 62994
  misc_feature: 527 for SV(C|O) and mtDNA

SEQ ID NO: 79815 - DNA, 120 bp, Homo sapiens
  misc_feature: 527 for SV(C|O) and mtDNA
gtgggggcaatgaatgaagcgaacagattttcgttcattttggttctcagggtttgttataattttttatttttatgggctttggtgagggaggtaggtggtagtttgtgtttaatattt

SEQ ID NO: 79816 - DNA, 120 bp, Homo sapiens
  misc_feature: 527 for SV(C|O) and mtDNA
accccctggtcaacctcaacctaggcctcctatttattctagccacctctagcctagccgtttactcaatcctctgatcagggtgagcatcaaactcaaactacgccctgatcggcgcac

SEQ ID NO: 79817 - DNA, 120 bp, Homo sapiens; identical to SEQ ID NO: 62299
  misc_feature: 527 for SV(C|O) and mtDNA

SEQ ID NO: 79818 - DNA, 120 bp, Homo sapiens; identical to SEQ ID NO: 63070
  misc_feature: 527 for SV(C|O) and mtDNA

SEQ ID NO: 79819 - DNA, 120 bp, Homo sapiens; identical to SEQ ID NO: 60804
  misc_feature: 527 for SV(C|O) and mtDNA

SEQ ID NO: 79820 - DNA, 120 bp, Homo sapiens
  misc_feature: 527 for SV(C|O) and mtDNA
cgaaacgggatcaaacaaccccctaggaatcacctcccattccgataaaatcaccttccacccttactacacaatcaaagacgccctcggcttacttctcttccttctctccttaatgac

SEQ ID NO: 79821 - DNA, 120 bp, Homo sapiens
  misc_feature: 527 for SV(C|O) and mtDNA
ggtccatcatccacaaccttaacaatgaacaagatatccgaaaaataggaggactactcaaaaccatacctctcacttcaacctccctcaccattggcagcctagcattagcaggaatac

SEQ ID NO: 79822 - DNA, 120 bp, Homo sapiens
  misc_feature: 527 for SV(C|O) and mtDNA
ctgcccccgctaaccggctttttgcccaaatgggccattatcgaagaattcacaaaaaacaatagcctcatcatccccaccatcatagccaccatcaccctccttaacctctacttctac

SEQ ID NO: 79823 - DNA, 120 bp, Homo sapiens
  misc_feature: 527 for SV(C|O) and mtDNA
ctatctattactctcatcgctacctccctgacaagcgcctatagcactcgaataattcttctcaccctaacaggtcaacctcgcttccccacccttactaacattaacgaaaataacccc

SEQ ID NO: 79824 - DNA, 120 bp, Homo sapiens
  misc_feature: 527 for SV(C|O) and mtDNA
ctaatcacagcagtcctacttctcctatctctcccagtcctagctgctggcatcactatactactaacagaccgcaacctcaacaccaccttcttcgaccccgccggaggaggagacccc

SEQ ID NO: 79825 - DNA, 120 bp, Homo sapiens
  misc_feature: 527 for SV(C|O) and mtDNA
gctgccaatggtgagggaggttgaagtgagaggtatggttttgagtagtcctcctatttttcggatatcttgttcattgttaaggttgtggatgatggacccggagcacataaatagtat

SEQ ID NO: 79826 - DNA, 120 bp, Homo sapiens
  misc_feature: 527 for SV(C|O) and mtDNA
gagcttagcgctgtgatgagtgtgcctgcaaagatggtagagtagatgacgggttgggccaggggattaattagtacgggaagggtataaccaacattttcggggtatgggcccgatagc

SEQ ID NO: 79827 - DNA, 120 bp, Homo sapiens
  misc_feature: 527 for SV(C|O) and mtDNA
gatccgtcctaatcacagcagtcctacttctcctatctctcccagtcctagctgctggcatcactatactactaacagaccgcaacctcaacaccaccttcttcgaccccgccggaggag

SEQ ID NO: 79828 - DNA, 120 bp, Homo sapiens
  misc_feature: 527 for SV(C|O) and mtDNA
gaataggcttccggctgtcaggcgtttaatggggtttagtagggtggggttattttcgttaatgttagtaagggtggggaagcgaggttgacctgttagggtgagaagaattattcgagt

SEQ ID NO: 79829 - DNA, 120 bp, Homo sapiens
  misc_feature: 527 for SV(C|O) and mtDNA
cggcttcgaccctatatcccccgcccgcgtccctttctccataaaattcttcttagtagctattaccttcttattatttgatctagaaattgccctccttttacccctaccatgagccct

SEQ ID NO: 79830 - DNA, 120 bp, Homo sapiens; identical to SEQ ID NO: 58190
  misc_feature: 527 for SV(C|O) and mtDNA

SEQ ID NO: 79831 - DNA, 120 bp, Homo sapiens
  misc_feature: 527 for SV(C|O) and mtDNA
ataccaaatgcatggagagctcccgtgagtggttaatagggtgatagacctgtgatccatcgtgatgtcttatttaaggggaacgtgtgggctatttaggctttatggccctgaagtagg

SEQ ID NO: 79832 - DNA, 120 bp, Homo sapiens; identical to SEQ ID NO: 60045
  misc_feature: 527 for SV(C|O) and mtDNA

SEQ ID NO: 79833 - DNA, 120 bp, Homo sapiens
  misc_feature: 527 for SV(C|O) and mtDNA
atcaaatcaattggccaccaatggtactgaacctacgagtacaccgactacggcggactaatcttcaactcctacatacttcccccattattcctagaaccaggcgacctgcgactcctt

SEQ ID NO: 79834 - DNA, 120 bp, Homo sapiens
  misc_feature: 527 for SV(C|O) and mtDNA
atagtatggctttgaagaaggcgtgggtacagatgtgcaggaatgctaggtgtggttggttgatgccgattgtaactattatgagtcctagttgacttgaagtggagaaggctacgattt

SEQ ID NO: 79835 - DNA, 120 bp, Homo sapiens
  misc_feature: 526 for SV(C|O) and mtDNA
tttgtgtattcggctatgaagaataaggcgaaggggcctgcggcgtattcgatgttgaagcctgagactagttcggactctccttcggcaaggtcgaagggggttcggttggtctctgct

SEQ ID NO: 79836 - DNA, 120 bp, Homo sapiens
  misc_feature: 526 for SV(C|O) and mtDNA
tttggctcgtaagaaggcctagataggggattgtgcggtgtgtgatggtagggtagaatccgagtatgttggagaaataaaatgtgcatagtggggattttattttaagtttgttggtta

SEQ ID NO: 79837 - DNA, 120 bp, Homo sapiens
  misc_feature: 526 for SV(C|O) and mtDNA
tttctcgtgttacatcgcgccatcattggtatatggttagtgtgttggttagtaggcctagtatgaggagcgttatggagtggaagtgaaatcacatggctaggccggaggtcattagga

SEQ ID NO: 79838 - DNA, 120 bp, Homo sapiens; identical to SEQ ID NO: 59807
  misc_feature: 526 for SV(C|O) and mtDNA

SEQ ID NO: 79839 - DNA, 120 bp, Homo sapiens; identical to SEQ ID NO: 62998
  misc_feature: 526 for SV(C|O) and mtDNA

SEQ ID NO: 79840 - DNA, 120 bp, Homo sapiens
  misc_feature: 526 for SV(C|O) and mtDNA
tcttggtgacaaaatatgttgtgtagagttcaggggagagtgcgtcatatgttgttcctaggaagattgtagtggtgagggtgtttattataataatgtttgtgtattcggctatgaaga

SEQ ID NO: 79841 - DNA, 120 bp, Homo sapiens
  misc_feature: 526 for SV(C|O) and mtDNA
tcggctatgaagaataaggcgaaggggcctgcggcgtattcgatgttgaagcctgagactagttcggactctccttcggcaaggtcgaagggggttcggttggtctctgctagtgtggag

SEQ ID NO: 79842 - DNA, 120 bp, Homo sapiens
  misc_feature: 526 for SV(C|O) and mtDNA
tccatcatccacaaccttaacaatgaacaagatatccgaaaaataggaggactactcaaaaccatacctctcacttcaacctccctcaccattggcagcctagcattagcaggaatacct

SEQ ID NO: 79843 - DNA, 120 bp, Homo sapiens
  misc_feature: 526 for SV(C|O) and mtDNA
tcaggtgagttttagctttattggggagggggtgatctaaaacactctttacgccggcttctattgacttgggttaatcgtgtgaccgcggtggctggcacgaaattgaccaaccctggg

SEQ ID NO: 79844 - DNA, 120 bp, Homo sapiens; identical to SEQ ID NO: 59637
  misc_feature: 526 for SV(C|O) and mtDNA

SEQ ID NO: 79845 - DNA, 120 bp, Homo sapiens
  misc_feature: 526 for SV(C|O) and mtDNA
tactcccactaatagctttttgatgacttctagcaagcctcgctaacctcgccttaccccccactattaacctactgggagaactctctgtgctagtaaccacgttctcctgatcaaata

SEQ ID NO: 79846 - DNA, 120 bp, Homo sapiens
  misc_feature: 526 for SV(C|O) and mtDNA
cctgcccccgctaaccggctttttgcccaaatgggccattatcgaagaattcacaaaaaacaatagcctcatcatccccaccatcatagccaccatcaccctccttaacctctacttcta

SEQ ID NO: 79847 - DNA, 120 bp, Homo sapiens
  misc_feature: 526 for SV(C|O) and mtDNA
tacgaatgggggcttcaatcgggagtactactcgattgtcaacgtcaaggagtcgcaggtcgcctggttctaggaataatgggggaagtatgtaggagttgaagattagtccgccgtagt

SEQ ID NO: 79848 - DNA, 120 bp, Homo sapiens
  misc_feature: 526 for SV(C|O) and mtDNA
taccaacacctattctgatttttcggtcaccctgaagtttatattcttatcctaccaggcttcggaataatctcccatattgtaacttactactccggaaaaaaagaaccatttggatac

SEQ ID NO: 79849 - DNA, 120 bp, Homo sapiens
  misc_feature: 526 for SV(C|O) and mtDNA
gggggcttcaatcgggagtactactcgattgtcaacgtcaaggagtcgcaggtcgcctggttctaggaataatgggggaagtatgtaggagttgaagattagtccgccgtagtcggtgta

SEQ ID NO: 79850 - DNA, 120 bp, Homo sapiens
  misc_feature: 526 for SV(C|O) and mtDNA
ggggaattaattctaggacgatgggcatgaaactgtggtttgctccacagatttcagagcattgaccgtagtatacccccggtcgtgtagcggtgaaagtggtttggtttagacgtccgg

SEQ ID NO: 79851 - DNA, 120 bp, Homo sapiens
  misc_feature: 526 for SV(C|O) and mtDNA
ggatgattcagccataatttacgtctcgagtgatgtgggcgattgatgaaaaggcggttgaggcgtctggtgagtagtgcatggctaggaatagtcctgtggtgatttggaggatcaggc

SEQ ID NO: 79852 - DNA, 120 bp, Homo sapiens; identical to SEQ ID NO: 58599
  misc_feature: 526 for SV(C|O) and mtDNA

SEQ ID NO: 79853 - DNA, 120 bp, Homo sapiens; identical to SEQ ID NO: 59647
  misc_feature: 526 for SV(C|O) and mtDNA

SEQ ID NO: 79854 - DNA, 120 bp, Homo sapiens
  misc_feature: 526 for SV(C|O) and mtDNA
actgtaaagaggtgttggttctcttaatctttaacttaaaaggttaatgctaagttagctttacagtgggctctagagggggtagagggggtgctatagggtaaatacgggccctatttc

SEQ ID NO: 79855 - DNA, 120 bp, Homo sapiens; identical to SEQ ID NO: 62891
  misc_feature: 526 for SV(C|O) and mtDNA

SEQ ID NO: 79856 - DNA, 120 bp, Homo sapiens
  misc_feature: 526 for SV(C|O) and mtDNA
ccttagctgttacagaaattaagtattgcaacttactgagggctttgaaggctcttggtctgtatttaacctaaatttctataagattattagtataaaaggggagataggtaggagtag

SEQ ID NO: 79857 - DNA, 120 bp, Homo sapiens
  misc_feature: 526 for SV(C|O) and mtDNA
aggggcctgcggcgtattcgatgttgaagcctgagactagttcggactctccttcggcaaggtcgaagggggttcggttggtctctgctagtgtggagataaatcatattatggccaagg

SEQ ID NO: 79858 - DNA, 120 bp, Homo sapiens
  misc_feature: 526 for SV(C|O) and mtDNA
caggcggcaaagactagtatggcaataggcacaatattggctaagagggagtgggtgttgagggttatgagagtagctataatgaacagtgatagtattattccttctaggcatagtagg

SEQ ID NO: 79859 - DNA, 120 bp, Homo sapiens; identical to SEQ ID NO: 61798
  misc_feature: 526 for SV(C|O) and mtDNA

SEQ ID NO: 79860 - DNA, 120 bp, Homo sapiens
  misc_feature: 526 for SV(C|O) and mtDNA
catccacaaccttaacaatgaacaagatatccgaaaaataggaggactactcaaaaccatacctctcacttcaacctccctcaccattggcagcctagcattagcaggaatacctttcct

SEQ ID NO: 79861 - DNA, 120 bp, Homo sapiens
  misc_feature: 526 for SV(C|O) and mtDNA
aggtcagctaaataagctatcgggcccataccccgaaaatgttggttatacccttcccgtactaattaatcccctggcccaacccgtcatctactctaccatctttgcaggcacactcat

SEQ ID NO: 79862 - DNA, 120 bp, Homo sapiens
  misc_feature: 526 for SV(C|O) and mtDNA
actcccactaatagctttttgatgacttctagcaagcctcgctaacctcgccttaccccccactattaacctactgggagaactctctgtgctagtaaccacgttctcctgatcaaatat

SEQ ID NO: 79863 - DNA, 120 bp, Homo sapiens
  misc_feature: 526 for SV(C|O) and mtDNA
agcttagcgctgtgatgagtgtgcctgcaaagatggtagagtagatgacgggttgggccaggggattaattagtacgggaagggtataaccaacattttcggggtatgggcccgatagct

SEQ ID NO: 79864 - DNA, 120 bp, Homo sapiens; identical to SEQ ID NO: 59209
  misc_feature: 526 for SV(C|O) and mtDNA

SEQ ID NO: 79865 - DNA, 120 bp, Homo sapiens
  misc_feature: 525 for SV(C|O) and mtDNA
ttgtgatgtaattattatacgaatgggggcttcaatcgggagtactactcgattgtcaacgtcaaggagtcgcaggtcgcctggttctaggaataatgggggaagtatgtaggagttgaa

SEQ ID NO: 79866 - DNA, 120 bp, Homo sapiens
  misc_feature: 525 for SV(C|O) and mtDNA
ttattaggggaactagtcagttgccaaagcctccgattatgatgggtattactatgaagaagattattacaaatgcatgggctgtgacgataacgttgtagatgtggtcgttacctagaa

SEQ ID NO: 79867 - DNA, 120 bp, Homo sapiens
  misc_feature: 525 for SV(C|O) and mtDNA
gcggactaatcttcaactcctacatacttcccccattattcctagaaccaggcgacctgcgactccttgacgttgacaatcgagtagtactcccgattgaagcccccattcgtataataa

SEQ ID NO: 79868 - DNA, 120 bp, Homo sapiens
  misc_feature: 525 for SV(C|O) and mtDNA
ttaggggaattaattctaggacgatgggcatgaaactgtggtttgctccacagatttcagagcattgaccgtagtatacccccggtcgtgtagcggtgaaagtggtttggtttagacgtc

SEQ ID NO: 79869 - DNA, 120 bp, Homo sapiens
  misc_feature: 525 for SV(C|O) and mtDNA
ttaggcttaaaaacagatgcaattcccggacgtctaaaccaaaccactttcaccgctacacgaccgggggtatactacggtcaatgctctgaaatctgtggagcaaaccacagtttcatg

SEQ ID NO: 79870 - DNA, 120 bp, Homo sapiens
  misc_feature: 525 for SV(C|O) and mtDNA
ttagctgttacagaaattaagtattgcaacttactgagggctttgaaggctcttggtctgtatttaacctaaatttctataagattattagtataaaaggggagataggtaggagtagcg

SEQ ID NO: 79871 - DNA, 120 bp, Homo sapiens
  misc_feature: 525 for SV(C|O) and mtDNA
aggcagttgaggtggattaaaccaaacccagctacgcaaaatcttagcatactcctcaattacccacataggatgaataatagcagttctaccgtacaaccctaacataaccattcttaa

SEQ ID NO: 79872 - DNA, 120 bp, Homo sapiens; identical to SEQ ID NO: 61831
  misc_feature: 525 for SV(C|O) and mtDNA

SEQ ID NO: 79873 - DNA, 120 bp, Homo sapiens
  misc_feature: 525 for SV(C|O) and mtDNA
aatattaaacacaaactaccacctacctccctcaccaaagcccataaaaataaaaaattataacaaaccctgagaaccaaaatgaacgaaaatctgttcgcttcattcattgcccccaca

SEQ ID NO: 79874 - DNA, 120 bp, Homo sapiens
  misc_feature: 525 for SV(C|O) and mtDNA
tcccactaatagctttttgatgacttctagcaagcctcgctaacctcgccttaccccccactattaacctactgggagaactctctgtgctagtaaccacgttctcctgatcaaatatca

SEQ ID NO: 79875 - DNA, 120 bp, Homo sapiens
  misc_feature: 525 for SV(C|O) and mtDNA
tccgtcctaatcacagcagtcctacttctcctatctctcccagtcctagctgctggcatcactatactactaacagaccgcaacctcaacaccaccttcttcgaccccgccggaggagga

SEQ ID NO: 79876 - DNA, 120 bp, Homo sapiens
  misc_feature: 525 for SV(C|O) and mtDNA
tcacagccctatactccctctacatatttaccacaacacaatggggctcactcacccaccacattaacaacataaaaccctcattcacacgagaaaacaccctcatgttcatacacctat

SEQ ID NO: 79877 - DNA, 120 bp, Homo sapiens; identical to SEQ ID NO: 56375
  misc_feature: 525 for SV(C|O) and mtDNA

SEQ ID NO: 79878 - DNA, 120 bp, Homo sapiens; identical to SEQ ID NO: 58858
  misc_feature: 525 for SV(C|O) and mtDNA

SEQ ID NO: 79879 - DNA, 120 bp, Homo sapiens
  misc_feature: 525 for SV(C|O) and mtDNA
taatgtttgtgtattcggctatgaagaataaggcgaaggggcctgcggcgtattcgatgttgaagcctgagactagttcggactctccttcggcaaggtcgaagggggttcggttggtct

SEQ ID NO: 79880 - DNA, 120 bp, Homo sapiens; identical to SEQ ID NO: 54008
  misc_feature: 525 for SV(C|O) and mtDNA

SEQ ID NO: 79881 - DNA, 120 bp, Homo sapiens
  misc_feature: 525 for SV(C|O) and mtDNA
cttacacaaaatgacatcaaaaaaatcgtagccttctccacttcaagtcaactaggactcataatagttacaatcggcatcaaccaaccacacctagcattcctgcacatctgtacccac

SEQ ID NO: 79882 - DNA, 120 bp, Homo sapiens; identical to SEQ ID NO: 61868
  misc_feature: 525 for SV(C|O) and mtDNA

SEQ ID NO: 79883 - DNA, 120 bp, Homo sapiens
  misc_feature: 525 for SV(C|O) and mtDNA
gtccatcatccacaaccttaacaatgaacaagatatccgaaaaataggaggactactcaaaaccatacctctcacttcaacctccctcaccattggcagcctagcattagcaggaatacc

SEQ ID NO: 79884 - DNA, 120 bp, Homo sapiens
  misc_feature: 525 for SV(C|O) and mtDNA
cccctccccatacccaaccccctggtcaacctcaacctaggcctcctatttattctagccacctctagcctagccgtttactcaatcctctgatcagggtgagcatcaaactcaaactac

SEQ ID NO: 79885 - DNA, 120 bp, Homo sapiens
  misc_feature: 525 for SV(C|O) and mtDNA
ggttatatgggtttaatagtttttttaatttatttagggggaatgatggttgtctttggatatactacagcgatggctattgaggagtatcctgaggcatgggggtcaggggttgaggtc

SEQ ID NO: 79886 - DNA, 120 bp, Homo sapiens; identical to SEQ ID NO: 57847
  misc_feature: 525 for SV(C|O) and mtDNA

SEQ ID NO: 79887 - DNA, 120 bp, Homo sapiens
  misc_feature: 525 for SV(C|O) and mtDNA
aggcttaaaaacagatgcaattcccggacgtctaaaccaaaccactttcaccgctacacgaccgggggtatactacggtcaatgctctgaaatctgtggagcaaaccacagtttcatgcc

SEQ ID NO: 79888 - DNA, 120 bp, Homo sapiens
  misc_feature: 525 for SV(C|O) and mtDNA
ggaagtaaagtttaattatgcctttttgggttgaggtgatgatggaggtggagatttggtgctgtgaaattgttttaggtaatagcttttctagtcaggttaggtctaggaggagtaggg

SEQ ID NO: 79889 - DNA, 120 bp, Homo sapiens; identical to SEQ ID NO: 54423
  misc_feature: 525 for SV(C|O) and mtDNA

SEQ ID NO: 79890 - DNA, 120 bp, Homo sapiens
  misc_feature: 525 for SV(C|O) and mtDNA
ctttctcgtgttacatcgcgccatcattggtatatggttagtgtgttggttagtaggcctagtatgaggagcgttatggagtggaagtgaaatcacatggctaggccggaggtcattagg

SEQ ID NO: 79891 - DNA, 120 bp, Homo sapiens
  misc_feature: 525 for SV(C|O) and mtDNA
ctcaggtgagttttagctttattggggagggggtgatctaaaacactctttacgccggcttctattgacttgggttaatcgtgtgaccgcggtggctggcacgaaattgaccaaccctgg

SEQ ID NO: 79892 - DNA, 120 bp, Homo sapiens
  misc_feature: 525 for SV(C|O) and mtDNA
cgaatgggggcttcaatcgggagtactactcgattgtcaacgtcaaggagtcgcaggtcgcctggttctaggaataatgggggaagtatgtaggagttgaagattagtccgccgtagtcg

SEQ ID NO: 79893 - DNA, 120 bp, Homo sapiens; identical to SEQ ID NO: 63040
  misc_feature: 525 for SV(C|O) and mtDNA

SEQ ID NO: 79894 - DNA, 120 bp, Homo sapiens
  misc_feature: 525 for SV(C|O) and mtDNA
catcaaatcaattggccaccaatggtactgaacctacgagtacaccgactacggcggactaatcttcaactcctacatacttcccccattattcctagaaccaggcgacctgcgactcct

SEQ ID NO: 79895 - DNA, 120 bp, Homo sapiens
  misc_feature: 525 for SV(C|O) and mtDNA
cacctattctgatttttcggtcaccctgaagtttatattcttatcctaccaggcttcggaataatctcccatattgtaacttactactccggaaaaaaagaaccatttggatacataggt

SEQ ID NO: 79896 - DNA, 120 bp, Homo sapiens
  misc_feature: 525 for SV(C|O) and mtDNA
caacctgttcctgctccggcctccactatagcagatgcgagcaggagtaggagagagggaggtaagagtcagaagcttatgttgtttatgcggggaaacgccatatcgggggcaccgatt

SEQ ID NO: 79897 - DNA, 120 bp, Homo sapiens
  misc_feature: 525 for SV(C|O) and mtDNA
aaacgggatcaaacaaccccctaggaatcacctcccattccgataaaatcaccttccacccttactacacaatcaaagacgccctcggcttacttctcttccttctctccttaatgacat

SEQ ID NO: 79898 - DNA, 120 bp, Homo sapiens
  misc_feature: 525 for SV(C|O) and mtDNA
aggccaaatatcattctgaggggccacagtaattacaaacttactatccgccatcccatacattgggacagacctagttcaatgaatctgaggaggctactcagtagacagtcccaccct

SEQ ID NO: 79899 - DNA, 120 bp, Homo sapiens
  misc_feature: 524 for SV(C|O) and mtDNA
tcaaccaaccacacctagcattcctgcacatctgtacccacgccttcttcaaagccatactatttatgtgctccgggtccatcatccacaaccttaacaatgaacaagatatccgaaaaa

SEQ ID NO: 79900 - DNA, 120 bp, Homo sapiens
  misc_feature: 524 for SV(C|O) and mtDNA
tttttaggggaattaattctaggacgatgggcatgaaactgtggtttgctccacagatttcagagcattgaccgtagtatacccccggtcgtgtagcggtgaaagtggtttggtttagac

SEQ ID NO: 79901 - DNA, 120 bp, Homo sapiens
  misc_feature: 524 for SV(C|O) and mtDNA
ctatactaaccccagggttggtcaatttcgtgccagccaccgcggtcacacgattaacccaagtcaatagaagccggcgtaaagagtgttttagatcaccccctccccaataaagctaaa

SEQ ID NO: 79902 - DNA, 120 bp, Homo sapiens; identical to SEQ ID NO: 62143
  misc_feature: 524 for SV(C|O) and mtDNA

SEQ ID NO: 79903 - DNA, 120 bp, Homo sapiens
  misc_feature: 524 for SV(C|O) and mtDNA
ttcggctatgaagaataaggcgaaggggcctgcggcgtattcgatgttgaagcctgagactagttcggactctccttcggcaaggtcgaagggggttcggttggtctctgctagtgtgga

SEQ ID NO: 79904 - DNA, 120 bp, Homo sapiens
  misc_feature: 524 for SV(C|O) and mtDNA
tagggggtggaagcggatgagtaagaagattcctgctacaactatagtgcttgagtggagtagggctgagactggggtggggccttctatggctgaggggagtcaggggtggagacctaa

SEQ ID NO: 79905 - DNA, 120 bp, Homo sapiens
  misc_feature: 524 for SV(C|O) and mtDNA
ttagcgctgtgatgagtgtgcctgcaaagatggtagagtagatgacgggttgggccaggggattaattagtacgggaagggtataaccaacattttcggggtatgggcccgatagcttat

SEQ ID NO: 79906 - DNA, 120 bp, Homo sapiens
  misc_feature: 524 for SV(C|O) and mtDNA
gaaacgggatcaaacaaccccctaggaatcacctcccattccgataaaatcaccttccacccttactacacaatcaaagacgccctcggcttacttctcttccttctctccttaatgaca

SEQ ID NO: 79907 - DNA, 120 bp, Homo sapiens
  misc_feature: 524 for SV(C|O) and mtDNA
tatctattactctcatcgctacctccctgacaagcgcctatagcactcgaataattcttctcaccctaacaggtcaacctcgcttccccacccttactaacattaacgaaaataacccca

SEQ ID NO: 79908 - DNA, 120 bp, Homo sapiens
  misc_feature: 524 for SV(C|O) and mtDNA
acttcagggtgaccgaaaaatcagaataggtgttggtatagaatggggtctcctcctccggcggggtcgaagaaggtggtgttgaggttgcggtctgttagtagtatagtgatgccagca

SEQ ID NO: 79909 - DNA, 120 bp, Homo sapiens
  misc_feature: 524 for SV(C|O) and mtDNA
tgccaatggtgagggaggttgaagtgagaggtatggttttgagtagtcctcctatttttcggatatcttgttcattgttaaggttgtggatgatggacccggagcacataaatagtatgg

SEQ ID NO: 79910 - DNA, 120 bp, Homo sapiens
  misc_feature: 524 for SV(C|O) and mtDNA
tctgaggggccacagtaattacaaacttactatccgccatcccatacattgggacagacctagttcaatgaatctgaggaggctactcagtagacagtcccaccctcacacgattcttta

SEQ ID NO: 79911 - DNA, 120 bp, Homo sapiens
  misc_feature: 524 for SV(C|O) and mtDNA
cggagcacataaatagtatggctttgaagaaggcgtgggtacagatgtgcaggaatgctaggtgtggttggttgatgccgattgtaactattatgagtcctagttgacttgaagtggaga

SEQ ID NO: 79912 - DNA, 120 bp, Homo sapiens
  misc_feature: 524 for SV(C|O) and mtDNA
gagagctcccgtgagtggttaatagggtgatagacctgtgatccatcgtgatgtcttatttaaggggaacgtgtgggctatttaggctttatggccctgaagtaggaaccagatgtcgga

SEQ ID NO: 79913 - DNA, 120 bp, Homo sapiens; identical to SEQ ID NO: 57899
  misc_feature: 524 for SV(C|O) and mtDNA

SEQ ID NO: 79914 - DNA, 120 bp, Homo sapiens
  misc_feature: 524 for SV(C|O) and mtDNA
tataataatgtttgtgtattcggctatgaagaataaggcgaaggggcctgcggcgtattcgatgttgaagcctgagactagttcggactctccttcggcaaggtcgaagggggttcggtt

SEQ ID NO: 79915 - DNA, 120 bp, Homo sapiens
  misc_feature: 524 for SV(C|O) and mtDNA
taggggaattaattctaggacgatgggcatgaaactgtggtttgctccacagatttcagagcattgaccgtagtatacccccggtcgtgtagcggtgaaagtggtttggtttagacgtcc

SEQ ID NO: 79916 - DNA, 120 bp, Homo sapiens
  misc_feature: 524 for SV(C|O) and mtDNA
aggtgcgagatagtagtagggtcgtggtgctggagtttaagttgagtagtaggaatgcggtagtagttaggataatataaatagttaaattaagaatggttatgttagggttgtacggta

SEQ ID NO: 79917 - DNA, 120 bp, Homo sapiens
  misc_feature: 524 for SV(C|O) and mtDNA
ccaaatatcattctgaggggccacagtaattacaaacttactatccgccatcccatacattgggacagacctagttcaatgaatctgaggaggctactcagtagacagtcccaccctcac

SEQ ID NO: 79918 - DNA, 120 bp, Homo sapiens
  misc_feature: 524 for SV(C|O) and mtDNA
gaggccaaatatcattctgaggggccacagtaattacaaacttactatccgccatcccatacattgggacagacctagttcaatgaatctgaggaggctactcagtagacagtcccaccc

SEQ ID NO: 79919 - DNA, 120 bp, Homo sapiens
  misc_feature: 524 for SV(C|O) and mtDNA
gggcatttcactgtaaagaggtgttggttctcttaatctttaacttaaaaggttaatgctaagttagctttacagtgggctctagagggggtagagggggtgctatagggtaaatacggg

SEQ ID NO: 79920 - DNA, 120 bp, Homo sapiens; identical to SEQ ID NO: 60359
  misc_feature: 524 for SV(C|O) and mtDNA

SEQ ID NO: 79921 - DNA, 120 bp, Homo sapiens; identical to SEQ ID NO: 62681
  misc_feature: 524 for SV(C|O) and mtDNA

SEQ ID NO: 79922 - DNA, 120 bp, Homo sapiens; identical to SEQ ID NO: 58392
  misc_feature: 524 for SV(C|O) and mtDNA

SEQ ID NO: 79923 - DNA, 120 bp, Homo sapiens
  misc_feature: 524 for SV(C|O) and mtDNA
caggaatgctaggtgtggttggttgatgccgattgtaactattatgagtcctagttgacttgaagtggagaaggctacgatttttttgatgtcattttgtgtaagggcgcagactgctgc

SEQ ID NO: 79924 - DNA, 120 bp, Homo sapiens
  misc_feature: 524 for SV(C|O) and mtDNA
ataggcttccggctgtcaggcgtttaatggggtttagtagggtggggttattttcgttaatgttagtaagggtggggaagcgaggttgacctgttagggtgagaagaattattcgagtgc

SEQ ID NO: 79925 - DNA, 120 bp, Homo sapiens
  misc_feature: 524 for SV(C|O) and mtDNA
atcatccctctactattttttaaccaaatcaacaacaacctatttagctgttccccaaccttttcctccgaccccctaacaacccccctcctaatactaactacctgactcctacccctc

SEQ ID NO: 79926 - DNA, 120 bp, Homo sapiens
  misc_feature: 524 for SV(C|O) and mtDNA
ctgccaatggtgagggaggttgaagtgagaggtatggttttgagtagtcctcctatttttcggatatcttgttcattgttaaggttgtggatgatggacccggagcacataaatagtatg

SEQ ID NO: 79927 - DNA, 120 bp, Homo sapiens
  misc_feature: 524 for SV(C|O) and mtDNA
attcggctatgaagaataaggcgaaggggcctgcggcgtattcgatgttgaagcctgagactagttcggactctccttcggcaaggtcgaagggggttcggttggtctctgctagtgtgg

SEQ ID NO: 79928 - DNA, 120 bp, Homo sapiens
  misc_feature: 524 for SV(C|O) and mtDNA
cactgtaaagaggtgttggttctcttaatctttaacttaaaaggttaatgctaagttagctttacagtgggctctagagggggtagagggggtgctatagggtaaatacgggccctattt

SEQ ID NO: 79929 - DNA, 120 bp, Homo sapiens
  misc_feature: 524 for SV(C|O) and mtDNA
attttctgctagggggtggaagcggatgagtaagaagattcctgctacaactatagtgcttgagtggagtagggctgagactggggtggggccttctatggctgaggggagtcaggggtg

SEQ ID NO: 79930 - DNA, 120 bp, Homo sapiens
  misc_feature: 524 for SV(C|O) and mtDNA
aatcacagcagtcctacttctcctatctctcccagtcctagctgctggcatcactatactactaacagaccgcaacctcaacaccaccttcttcgaccccgccggaggaggagaccccat

SEQ ID NO: 79931 - DNA, 120 bp, Homo sapiens
  misc_feature: 524 for SV(C|O) and mtDNA
aaactctactcccactaatagctttttgatgacttctagcaagcctcgctaacctcgccttaccccccactattaacctactgggagaactctctgtgctagtaaccacgttctcctgat

SEQ ID NO: 79932 - DNA, 120 bp, Homo sapiens
  misc_feature: 524 for SV(C|O) and mtDNA
aaatgacatcaaaaaaatcgtagccttctccacttcaagtcaactaggactcataatagttacaatcggcatcaaccaaccacacctagcattcctgcacatctgtacccacgccttctt

SEQ ID NO: 79933 - DNA, 120 bp, Homo sapiens; identical to SEQ ID NO: 59080
  misc_feature: 523 for SV(C|O) and mtDNA

SEQ ID NO: 79934 - DNA, 120 bp, Homo sapiens
  misc_feature: 523 for SV(C|O) and mtDNA
atattaaacacaaactaccacctacctccctcaccaaagcccataaaaataaaaaattataacaaaccctgagaaccaaaatgaacgaaaatctgttcgcttcattcattgcccccacaa

SEQ ID NO: 79935 - DNA, 120 bp, Homo sapiens
  misc_feature: 523 for SV(C|O) and mtDNA
ttggtgacaaaatatgttgtgtagagttcaggggagagtgcgtcatatgttgttcctaggaagattgtagtggtgagggtgtttattataataatgtttgtgtattcggctatgaagaat

SEQ ID NO: 79936 - DNA, 120 bp, Homo sapiens
  misc_feature: 523 for SV(C|O) and mtDNA
acggcggactaatcttcaactcctacatacttcccccattattcctagaaccaggcgacctgcgactccttgacgttgacaatcgagtagtactcccgattgaagcccccattcgtataa

SEQ ID NO: 79937 - DNA, 120 bp, Homo sapiens
  misc_feature: 523 for SV(C|O) and mtDNA
ttataataatgtttgtgtattcggctatgaagaataaggcgaaggggcctgcggcgtattcgatgttgaagcctgagactagttcggactctccttcggcaaggtcgaagggggttcggt

SEQ ID NO: 79938 - DNA, 120 bp, Homo sapiens; identical to SEQ ID NO: 62698
  misc_feature: 523 for SV(C|O) and mtDNA

SEQ ID NO: 79939 - DNA, 120 bp, Homo sapiens
  misc_feature: 523 for SV(C|O) and mtDNA
tggttaatagggtgatagacctgtgatccatcgtgatgtcttatttaaggggaacgtgtgggctatttaggctttatggccctgaagtaggaaccagatgtcggatacagttcactttag

SEQ ID NO: 79940 - DNA, 120 bp, Homo sapiens
  misc_feature: 523 for SV(C|O) and mtDNA
tgcaagacgtcttgtgatgtaattattatacgaatgggggcttcaatcgggagtactactcgattgtcaacgtcaaggagtcgcaggtcgcctggttctaggaataatgggggaagtatg

SEQ ID NO: 79941 - DNA, 120 bp, Homo sapiens
  misc_feature: 523 for SV(C|O) and mtDNA
ctgtaaagaggtgttggttctcttaatctttaacttaaaaggttaatgctaagttagctttacagtgggctctagagggggtagagggggtgctatagggtaaatacgggccctatttca

SEQ ID NO: 79942 - DNA, 120 bp, Homo sapiens
  misc_feature: 523 for SV(C|O) and mtDNA
tcatccacaaccttaacaatgaacaagatatccgaaaaataggaggactactcaaaaccatacctctcacttcaacctccctcaccattggcagcctagcattagcaggaatacctttcc

SEQ ID NO: 79943 - DNA, 120 bp, Homo sapiens
  misc_feature: 523 for SV(C|O) and mtDNA
tattcggctatgaagaataaggcgaaggggcctgcggcgtattcgatgttgaagcctgagactagttcggactctccttcggcaaggtcgaagggggttcggttggtctctgctagtgtg

SEQ ID NO: 79944 - DNA, 120 bp, Homo sapiens
  misc_feature: 523 for SV(C|O) and mtDNA
ccccctccccatacccaaccccctggtcaacctcaacctaggcctcctatttattctagccacctctagcctagccgtttactcaatcctctgatcagggtgagcatcaaactcaaacta

SEQ ID NO: 79945 - DNA, 120 bp, Homo sapiens
  misc_feature: 523 for SV(C|O) and mtDNA
tagtaagattacacatgcaagcatccccgttccagtgagttcaccctctaaatcaccacgatcaaaagggacaagcatcaagcacgcagcaatgcagctcaaaacgcttagcctagccac

SEQ ID NO: 79946 - DNA, 120 bp, Homo sapiens
  misc_feature: 523 for SV(C|O) and mtDNA
acctattctgatttttcggtcaccctgaagtttatattcttatcctaccaggcttcggaataatctcccatattgtaacttactactccggaaaaaaagaaccatttggatacataggta

SEQ ID NO: 79947 - DNA, 120 bp, Homo sapiens
  misc_feature: 523 for SV(C|O) and mtDNA
acgggatcaaacaaccccctaggaatcacctcccattccgataaaatcaccttccacccttactacacaatcaaagacgccctcggcttacttctcttccttctctccttaatgacatta

SEQ ID NO: 79948 - DNA, 120 bp, Homo sapiens
  misc_feature: 523 for SV(C|O) and mtDNA
gtttgtgtattcggctatgaagaataaggcgaaggggcctgcggcgtattcgatgttgaagcctgagactagttcggactctccttcggcaaggtcgaagggggttcggttggtctctgc

SEQ ID NO: 79949 - DNA, 120 bp, Homo sapiens
  misc_feature: 523 for SV(C|O) and mtDNA
gtgtattcggctatgaagaataaggcgaaggggcctgcggcgtattcgatgttgaagcctgagactagttcggactctccttcggcaaggtcgaagggggttcggttggtctctgctagt

SEQ ID NO: 79950 - DNA, 120 bp, Homo sapiens
  misc_feature: 523 for SV(C|O) and mtDNA
ccacaaccttaacaatgaacaagatatccgaaaaataggaggactactcaaaaccatacctctcacttcaacctccctcaccattggcagcctagcattagcaggaatacctttcctcac

SEQ ID NO: 79951 - DNA, 120 bp, Homo sapiens
  misc_feature: 523 for SV(C|O) and mtDNA
gtcttggtgacaaaatatgttgtgtagagttcaggggagagtgcgtcatatgttgttcctaggaagattgtagtggtgagggtgtttattataataatgtttgtgtattcggctatgaag

SEQ ID NO: 79952 - DNA, 120 bp, Homo sapiens
  misc_feature: 523 for SV(C|O) and mtDNA
ccgtgaggccaaatatcattctgaggggccacagtaattacaaacttactatccgccatcccatacattgggacagacctagttcaatgaatctgaggaggctactcagtagacagtccc

SEQ ID NO: 79953 - DNA, 120 bp, Homo sapiens
  misc_feature: 523 for SV(C|O) and mtDNA
cttagctgttacagaaattaagtattgcaacttactgagggctttgaaggctcttggtctgtatttaacctaaatttctataagattattagtataaaaggggagataggtaggagtagc

SEQ ID NO: 79954 - DNA, 120 bp, Homo sapiens
  misc_feature: 523 for SV(C|O) and mtDNA
acgaatgggggcttcaatcgggagtactactcgattgtcaacgtcaaggagtcgcaggtcgcctggttctaggaataatgggggaagtatgtaggagttgaagattagtccgccgtagtc

SEQ ID NO: 79955 - DNA, 120 bp, Homo sapiens
  misc_feature: 523 for SV(C|O) and mtDNA
cctaattattagcatcatccctctactattttttaaccaaatcaacaacaacctatttagctgttccccaaccttttcctccgaccccctaacaacccccctcctaatactaactacctg

SEQ ID NO: 79956 - DNA, 120 bp, Homo sapiens; identical to SEQ ID NO: 60627
  misc_feature: 523 for SV(C|O) and mtDNA

SEQ ID NO: 79957 - DNA, 120 bp, Homo sapiens
  misc_feature: 523 for SV(C|O) and mtDNA
cattggcgtgaaggtagcggatgattcagccataatttacgtctcgagtgatgtgggcgattgatgaaaaggcggttgaggcgtctggtgagtagtgcatggctaggaatagtcctgtgg

SEQ ID NO: 79958 - DNA, 120 bp, Homo sapiens; identical to SEQ ID NO: 62644
  misc_feature: 523 for SV(C|O) and mtDNA

SEQ ID NO: 79959 - DNA, 120 bp, Homo sapiens
  misc_feature: 523 for SV(C|O) and mtDNA
ataataatgtttgtgtattcggctatgaagaataaggcgaaggggcctgcggcgtattcgatgttgaagcctgagactagttcggactctccttcggcaaggtcgaagggggttcggttg

SEQ ID NO: 79960 - DNA, 120 bp, Homo sapiens
  misc_feature: 523 for SV(C|O) and mtDNA
atttcactgtaaagaggtgttggttctcttaatctttaacttaaaaggttaatgctaagttagctttacagtgggctctagagggggtagagggggtgctatagggtaaatacgggccct

SEQ ID NO: 79961 - DNA, 120 bp, Homo sapiens; identical to SEQ ID NO: 62619
  misc_feature: 523 for SV(C|O) and mtDNA

SEQ ID NO: 79962 - DNA, 120 bp, Homo sapiens
  misc_feature: 523 for SV(C|O) and mtDNA
agtatggctttgaagaaggcgtgggtacagatgtgcaggaatgctaggtgtggttggttgatgccgattgtaactattatgagtcctagttgacttgaagtggagaaggctacgattttt

SEQ ID NO: 79963 - DNA, 120 bp, Homo sapiens
  misc_feature: 522 for SV(C|O) and mtDNA
gacatcaaaaaaatcgtagccttctccacttcaagtcaactaggactcataatagttacaatcggcatcaaccaaccacacctagcattcctgcacatctgtacccacgccttcttcaaa

SEQ ID NO: 79964 - DNA, 120 bp, Homo sapiens
  misc_feature: 522 for SV(C|O) and mtDNA
gtaaagaggtgttggttctcttaatctttaacttaaaaggttaatgctaagttagctttacagtgggctctagagggggtagagggggtgctatagggtaaatacgggccctatttcaaa

SEQ ID NO: 79965 - DNA, 120 bp, Homo sapiens
  misc_feature: 522 for SV(C|O) and mtDNA
cttggtgacaaaatatgttgtgtagagttcaggggagagtgcgtcatatgttgttcctaggaagattgtagtggtgagggtgtttattataataatgtttgtgtattcggctatgaagaa

SEQ ID NO: 79966 - DNA, 120 bp, Homo sapiens
  misc_feature: 522 for SV(C|O) and mtDNA
ggagcacataaatagtatggctttgaagaaggcgtgggtacagatgtgcaggaatgctaggtgtggttggttgatgccgattgtaactattatgagtcctagttgacttgaagtggagaa

SEQ ID NO: 79967 - DNA, 120 bp, Homo sapiens
  misc_feature: 522 for SV(C|O) and mtDNA
ttattataataatgtttgtgtattcggctatgaagaataaggcgaaggggcctgcggcgtattcgatgttgaagcctgagactagttcggactctccttcggcaaggtcgaagggggttc

SEQ ID NO: 79968 - DNA, 120 bp, Homo sapiens
  misc_feature: 522 for SV(C|O) and mtDNA
cgaaggggcctgcggcgtattcgatgttgaagcctgagactagttcggactctccttcggcaaggtcgaagggggttcggttggtctctgctagtgtggagataaatcatattatggcca

SEQ ID NO: 79969 - DNA, 120 bp, Homo sapiens; identical to SEQ ID NO: 58679
  misc_feature: 522 for SV(C|O) and mtDNA

SEQ ID NO: 79970 - DNA, 120 bp, Homo sapiens
  misc_feature: 522 for SV(C|O) and mtDNA
ccgtttcgtgcaagaataggaggtggagtgctgctagggctgcaataatgaagggcaagatgaagtgaaaggtaaagaatcgtgtgagggtgggactgtctactgagtagcctcctcaga

SEQ ID NO: 79971 - DNA, 120 bp, Homo sapiens
  misc_feature: 522 for SV(C|O) and mtDNA
tctataccaacacctattctgatttttcggtcaccctgaagtttatattcttatcctaccaggcttcggaataatctcccatattgtaacttactactccggaaaaaaagaaccatttgg

SEQ ID NO: 79972 - DNA, 120 bp, Homo sapiens
  misc_feature: 522 for SV(C|O) and mtDNA
tcctcatcgccctcccatccctgcgcatcctttacataacagacgaggtcaacgatccctcccttaccatcaaatcaattggccaccaatggtactgaacctacgagtacaccgactacg

SEQ ID NO: 79973 - DNA, 120 bp, Homo sapiens
  misc_feature: 522 for SV(C|O) and mtDNA
tattaaacacaaactaccacctacctccctcaccaaagcccataaaaataaaaaattataacaaaccctgagaaccaaaatgaacgaaaatctgttcgcttcattcattgcccccacaat

SEQ ID NO: 79974 - DNA, 120 bp, Homo sapiens
  misc_feature: 522 for SV(C|O) and mtDNA
actctcatcgctacctccctgacaagcgcctatagcactcgaataattcttctcaccctaacaggtcaacctcgcttccccacccttactaacattaacgaaaataaccccaccctacta

SEQ ID NO: 79975 - DNA, 120 bp, Homo sapiens; identical to SEQ ID NO: 61211
  misc_feature: 522 for SV(C|O) and mtDNA

SEQ ID NO: 79976 - DNA, 120 bp, Homo sapiens
  misc_feature: 522 for SV(C|O) and mtDNA
gtaagattacacatgcaagcatccccgttccagtgagttcaccctctaaatcaccacgatcaaaagggacaagcatcaagcacgcagcaatgcagctcaaaacgcttagcctagccacac

SEQ ID NO: 79977 - DNA, 120 bp, Homo sapiens
  misc_feature: 522 for SV(C|O) and mtDNA
ataaacgaaagtttaactaagctatactaaccccagggttggtcaatttcgtgccagccaccgcggtcacacgattaacccaagtcaatagaagccggcgtaaagagtgttttagatcac

SEQ ID NO: 79978 - DNA, 120 bp, Homo sapiens
  misc_feature: 522 for SV(C|O) and mtDNA
cccactaatagctttttgatgacttctagcaagcctcgctaacctcgccttaccccccactattaacctactgggagaactctctgtgctagtaaccacgttctcctgatcaaatatcac

SEQ ID NO: 79979 - DNA, 120 bp, Homo sapiens
  misc_feature: 522 for SV(C|O) and mtDNA
gtatgagttggtcgtagcggaatcgggggtatgctgttcgaattcataagaacagggaggttagaagtagggtcttggtgacaaaatatgttgtgtagagttcaggggagagtgcgtcat

SEQ ID NO: 79980 - DNA, 120 bp, Homo sapiens
  misc_feature: 522 for SV(C|O) and mtDNA
ggcatttcactgtaaagaggtgttggttctcttaatctttaacttaaaaggttaatgctaagttagctttacagtgggctctagagggggtagagggggtgctatagggtaaatacgggc

SEQ ID NO: 79981 - DNA, 120 bp, Homo sapiens
  misc_feature: 522 for SV(C|O) and mtDNA
gcaagacgtcttgtgatgtaattattatacgaatgggggcttcaatcgggagtactactcgattgtcaacgtcaaggagtcgcaggtcgcctggttctaggaataatgggggaagtatgt

SEQ ID NO: 79982 - DNA, 120 bp, Homo sapiens
  misc_feature: 522 for SV(C|O) and mtDNA
atccacaaccttaacaatgaacaagatatccgaaaaataggaggactactcaaaaccatacctctcacttcaacctccctcaccattggcagcctagcattagcaggaatacctttcctc

SEQ ID NO: 79983 - DNA, 120 bp, Homo sapiens
  misc_feature: 522 for SV(C|O) and mtDNA
cttcagggtgaccgaaaaatcagaataggtgttggtatagaatggggtctcctcctccggcggggtcgaagaaggtggtgttgaggttgcggtctgttagtagtatagtgatgccagcag

SEQ ID NO: 79984 - DNA, 120 bp, Homo sapiens
  misc_feature: 522 for SV(C|O) and mtDNA
ctactcccactaatagctttttgatgacttctagcaagcctcgctaacctcgccttaccccccactattaacctactgggagaactctctgtgctagtaaccacgttctcctgatcaaat

SEQ ID NO: 79985 - DNA, 120 bp, Homo sapiens
  misc_feature: 522 for SV(C|O) and mtDNA
aaagctattagtgggagtagagtttgaagtccttgagagaggattatgatgcgactgtgagtgcgttcgtagtttgagtttgctaggcagaatagtaatgaggatgtaagtccgtgggcg

SEQ ID NO: 79986 - DNA, 120 bp, Homo sapiens
  misc_feature: 522 for SV(C|O) and mtDNA
attgaggcgccattggcgtgaaggtagcggatgattcagccataatttacgtctcgagtgatgtgggcgattgatgaaaaggcggttgaggcgtctggtgagtagtgcatggctaggaat

SEQ ID NO: 79987 - DNA, 120 bp, Homo sapiens
  misc_feature: 522 for SV(C|O) and mtDNA
atcagcccaattaggtctccacccctgactcccctcagccatagaaggccccaccccagtctcagccctactccactcaagcactatagttgtagcaggaatcttcttactcatccgctt

SEQ ID NO: 79988 - DNA, 120 bp, Homo sapiens
  misc_feature: 522 for SV(C|O) and mtDNA
atcaaacaaccccctaggaatcacctcccattccgataaaatcaccttccacccttactacacaatcaaagacgccctcggcttacttctcttccttctctccttaatgacattaacact

SEQ ID NO: 79989 - DNA, 120 bp, Homo sapiens
  misc_feature: 522 for SV(C|O) and mtDNA
aggttatatgggtttaatagtttttttaatttatttagggggaatgatggttgtctttggatatactacagcgatggctattgaggagtatcctgaggcatgggggtcaggggttgaggt

SEQ ID NO: 79990 - DNA, 120 bp, Homo sapiens
  misc_feature: 522 for SV(C|O) and mtDNA
agcgctgtgatgagtgtgcctgcaaagatggtagagtagatgacgggttgggccaggggattaattagtacgggaagggtataaccaacattttcggggtatgggcccgatagcttattt

SEQ ID NO: 79991 - DNA, 120 bp, Homo sapiens
  misc_feature: 521 for SV(C|O) and mtDNA
cggctatgaagaataaggcgaaggggcctgcggcgtattcgatgttgaagcctgagactagttcggactctccttcggcaaggtcgaagggggttcggttggtctctgctagtgtggaga

SEQ ID NO: 79992 - DNA, 120 bp, Homo sapiens
  misc_feature: 521 for SV(C|O) and mtDNA
attattaggggaactagtcagttgccaaagcctccgattatgatgggtattactatgaagaagattattacaaatgcatgggctgtgacgataacgttgtagatgtggtcgttacctaga

SEQ ID NO: 79993 - DNA, 120 bp, Homo sapiens
  misc_feature: 521 for SV(C|O) and mtDNA
aagctattagtgggagtagagtttgaagtccttgagagaggattatgatgcgactgtgagtgcgttcgtagtttgagtttgctaggcagaatagtaatgaggatgtaagtccgtgggcga

SEQ ID NO: 79994 - DNA, 120 bp, Homo sapiens
  misc_feature: 521 for SV(C|O) and mtDNA
caccaatggtactgaacctacgagtacaccgactacggcggactaatcttcaactcctacatacttcccccattattcctagaaccaggcgacctgcgactccttgacgttgacaatcga

SEQ ID NO: 79995 - DNA, 120 bp, Homo sapiens
  misc_feature: 521 for SV(C|O) and mtDNA
tcctaatcacagcagtcctacttctcctatctctcccagtcctagctgctggcatcactatactactaacagaccgcaacctcaacaccaccttcttcgaccccgccggaggaggagacc

SEQ ID NO: 79996 - DNA, 120 bp, Homo sapiens
  misc_feature: 521 for SV(C|O) and mtDNA
taactaagctatactaaccccagggttggtcaatttcgtgccagccaccgcggtcacacgattaacccaagtcaatagaagccggcgtaaagagtgttttagatcaccccctccccaata

SEQ ID NO: 79997 - DNA, 120 bp, Homo sapiens; identical to SEQ ID NO: 56669
  misc_feature: 521 for SV(C|O) and mtDNA

SEQ ID NO: 79998 - DNA, 120 bp, Homo sapiens
  misc_feature: 521 for SV(C|O) and mtDNA
aggcttccggctgtcaggcgtttaatggggtttagtagggtggggttattttcgttaatgttagtaagggtggggaagcgaggttgacctgttagggtgagaagaattattcgagtgcta

SEQ ID NO: 79999 - DNA, 120 bp, Homo sapiens
  misc_feature: 521 for SV(C|O) and mtDNA
ccaattaggtctccacccctgactcccctcagccatagaaggccccaccccagtctcagccctactccactcaagcactatagttgtagcaggaatcttcttactcatccgcttccaccc

SEQ ID NO: 80000 - DNA, 120 bp, Homo sapiens
  misc_feature: 521 for SV(C|O) and mtDNA
caattaggtctccacccctgactcccctcagccatagaaggccccaccccagtctcagccctactccactcaagcactatagttgtagcaggaatcttcttactcatccgcttccacccc

SEQ ID NO: 80001 - DNA, 120 bp, Homo sapiens; identical to SEQ ID NO: 59936
  misc_feature: 521 for SV(C|O) and mtDNA

SEQ ID NO: 80002 - DNA, 120 bp, Homo sapiens; identical to SEQ ID NO: 59355
  misc_feature: 521 for SV(C|O) and mtDNA

SEQ ID NO: 80003 - DNA, 120 bp, Homo sapiens
  misc_feature: 521 for SV(C|O) and mtDNA
acctctcacttcaacctccctcaccattggcagcctagcattagcaggaatacctttcctcacaggtttctactccaaagaccacatcatcgaaaccgcaaacatatcatacacaaacgc

SEQ ID NO: 80004 - DNA, 120 bp, Homo sapiens
  misc_feature: 521 for SV(C|O) and mtDNA
gccattggcgtgaaggtagcggatgattcagccataatttacgtctcgagtgatgtgggcgattgatgaaaaggcggttgaggcgtctggtgagtagtgcatggctaggaatagtcctgt

SEQ ID NO: 80005 - DNA, 120 bp, Homo sapiens; identical to SEQ ID NO: 57469
  misc_feature: 521 for SV(C|O) and mtDNA

SEQ ID NO: 80006 - DNA, 120 bp, Homo sapiens
  misc_feature: 521 for SV(C|O) and mtDNA
aagacgtcttgtgatgtaattattatacgaatgggggcttcaatcgggagtactactcgattgtcaacgtcaaggagtcgcaggtcgcctggttctaggaataatgggggaagtatgtag

SEQ ID NO: 80007 - DNA, 120 bp, Homo sapiens
  misc_feature: 521 for SV(C|O) and mtDNA
aaagagaggaagtaaagtttaattatgcctttttgggttgaggtgatgatggaggtggagatttggtgctgtgaaattgttttaggtaatagcttttctagtcaggttaggtctaggagg

SEQ ID NO: 80008 - DNA, 120 bp, Homo sapiens
  misc_feature: 521 for SV(C|O) and mtDNA
ccaatggtactgaacctacgagtacaccgactacggcggactaatcttcaactcctacatacttcccccattattcctagaaccaggcgacctgcgactccttgacgttgacaatcgagt

SEQ ID NO: 80009 - DNA, 120 bp, Homo sapiens
  misc_feature: 521 for SV(C|O) and mtDNA
aataggcttccggctgtcaggcgtttaatggggtttagtagggtggggttattttcgttaatgttagtaagggtggggaagcgaggttgacctgttagggtgagaagaattattcgagtg

SEQ ID NO: 80010 - DNA, 120 bp, Homo sapiens
  misc_feature: 521 for SV(C|O) and mtDNA
accccagggttggtcaatttcgtgccagccaccgcggtcacacgattaacccaagtcaatagaagccggcgtaaagagtgttttagatcaccccctccccaataaagctaaaactcacct

SEQ ID NO: 80011 - DNA, 120 bp, Homo sapiens
  misc_feature: 521 for SV(C|O) and mtDNA
agaggtgttggttctcttaatctttaacttaaaaggttaatgctaagttagctttacagtgggctctagagggggtagagggggtgctatagggtaaatacgggccctatttcaaagatt

SEQ ID NO: 80012 - DNA, 120 bp, Homo sapiens; identical to SEQ ID NO: 63053
  misc_feature: 520 for SV(C|O) and mtDNA

SEQ ID NO: 80013 - DNA, 120 bp, Homo sapiens; identical to SEQ ID NO: 53459
  misc_feature: 520 for SV(C|O) and mtDNA

SEQ ID NO: 80014 - DNA, 120 bp, Homo sapiens
  misc_feature: 520 for SV(C|O) and mtDNA
cgggatcaaacaaccccctaggaatcacctcccattccgataaaatcaccttccacccttactacacaatcaaagacgccctcggcttacttctcttccttctctccttaatgacattaa

SEQ ID NO: 80015 - DNA, 120 bp, Homo sapiens
  misc_feature: 520 for SV(C|O) and mtDNA
ggatcaaacaaccccctaggaatcacctcccattccgataaaatcaccttccacccttactacacaatcaaagacgccctcggcttacttctcttccttctctccttaatgacattaaca

SEQ ID NO: 80016 - DNA, 120 bp, Homo sapiens
  misc_feature: 520 for SV(C|O) and mtDNA
tgtgtattcggctatgaagaataaggcgaaggggcctgcggcgtattcgatgttgaagcctgagactagttcggactctccttcggcaaggtcgaagggggttcggttggtctctgctag

SEQ ID NO: 80017 - DNA, 120 bp, Homo sapiens; identical to SEQ ID NO: 60980
  misc_feature: 520 for SV(C|O) and mtDNA

SEQ ID NO: 80018 - DNA, 120 bp, Homo sapiens
  misc_feature: 520 for SV(C|O) and mtDNA
tgtattcggctatgaagaataaggcgaaggggcctgcggcgtattcgatgttgaagcctgagactagttcggactctccttcggcaaggtcgaagggggttcggttggtctctgctagtg

SEQ ID NO: 80019 - DNA, 120 bp, Homo sapiens
  misc_feature: 520 for SV(C|O) and mtDNA
agcggatgattcagccataatttacgtctcgagtgatgtgggcgattgatgaaaaggcggttgaggcgtctggtgagtagtgcatggctaggaatagtcctgtggtgatttggaggatca

SEQ ID NO: 80020 - DNA, 120 bp, Homo sapiens
  misc_feature: 520 for SV(C|O) and mtDNA
atttttaggggaattaattctaggacgatgggcatgaaactgtggtttgctccacagatttcagagcattgaccgtagtatacccccggtcgtgtagcggtgaaagtggtttggtttaga

SEQ ID NO: 80021 - DNA, 120 bp, Homo sapiens
  misc_feature: 520 for SV(C|O) and mtDNA
tcctagacctaacctgactagaaaagctattacctaaaacaatttcacagcaccaaatctccacctccatcatcacctcaacccaaaaaggcataattaaactttacttcctctctttct

SEQ ID NO: 80022 - DNA, 120 bp, Homo sapiens
  misc_feature: 520 for SV(C|O) and mtDNA
ctaattattagcatcatccctctactattttttaaccaaatcaacaacaacctatttagctgttccccaaccttttcctccgaccccctaacaacccccctcctaatactaactacctga

SEQ ID NO: 80023 - DNA, 120 bp, Homo sapiens
  misc_feature: 520 for SV(C|O) and mtDNA
gccagccaccgcggtcacacgattaacccaagtcaatagaagccggcgtaaagagtgttttagatcaccccctccccaataaagctaaaactcacctgagttgtaaaaaactccagctga

SEQ ID NO: 80024 - DNA, 120 bp, Homo sapiens
  misc_feature: 520 for SV(C|O) and mtDNA
tattaggggaactagtcagttgccaaagcctccgattatgatgggtattactatgaagaagattattacaaatgcatgggctgtgacgataacgttgtagatgtggtcgttacctagaag

SEQ ID NO: 80025 - DNA, 120 bp, Homo sapiens
  misc_feature: 520 for SV(C|O) and mtDNA
ctagggggtggaagcggatgagtaagaagattcctgctacaactatagtgcttgagtggagtagggctgagactggggtggggccttctatggctgaggggagtcaggggtggagaccta

SEQ ID NO: 80026 - DNA, 120 bp, Homo sapiens; identical to SEQ ID NO: 62999
  misc_feature: 520 for SV(C|O) and mtDNA

SEQ ID NO: 80027 - DNA, 120 bp, Homo sapiens
  misc_feature: 520 for SV(C|O) and mtDNA
tacccaaccccctggtcaacctcaacctaggcctcctatttattctagccacctctagcctagccgtttactcaatcctctgatcagggtgagcatcaaactcaaactacgccctgatcg

SEQ ID NO: 80028 - DNA, 120 bp, Homo sapiens; identical to SEQ ID NO: 61642
  misc_feature: 520 for SV(C|O) and mtDNA

SEQ ID NO: 80029 - DNA, 120 bp, Homo sapiens
  misc_feature: 520 for SV(C|O) and mtDNA
gtttgttaggtactgtttgcattaataaattaaagctccatagggtcttctcgtcttgctgtgtcatgcccgcctcttcacgggcaggtcaatttcactggttaaaagtaagagacagct

SEQ ID NO: 80030 - DNA, 120 bp, Homo sapiens; identical to SEQ ID NO: 62695
  misc_feature: 520 for SV(C|O) and mtDNA

SEQ ID NO: 80031 - DNA, 120 bp, Homo sapiens
  misc_feature: 520 for SV(C|O) and mtDNA
cacacctagcattcctgcacatctgtacccacgccttcttcaaagccatactatttatgtgctccgggtccatcatccacaaccttaacaatgaacaagatatccgaaaaataggaggac

SEQ ID NO: 80032 - DNA, 120 bp, Homo sapiens
  misc_feature: 520 for SV(C|O) and mtDNA
ccagccaccgcggtcacacgattaacccaagtcaatagaagccggcgtaaagagtgttttagatcaccccctccccaataaagctaaaactcacctgagttgtaaaaaactccagctgac

SEQ ID NO: 80033 - DNA, 120 bp, Homo sapiens
  misc_feature: 520 for SV(C|O) and mtDNA
gggggtagagggggtgctatagggtaaatacgggccctatttcaaagatttttaggggaattaattctaggacgatgggcatgaaactgtggtttgctccacagatttcagagcattgac

SEQ ID NO: 80034 - DNA, 120 bp, Homo sapiens
  misc_feature: 520 for SV(C|O) and mtDNA
gtattcggctatgaagaataaggcgaaggggcctgcggcgtattcgatgttgaagcctgagactagttcggactctccttcggcaaggtcgaagggggttcggttggtctctgctagtgt

SEQ ID NO: 80035 - DNA, 120 bp, Homo sapiens; identical to SEQ ID NO: 57844
  misc_feature: 520 for SV(C|O) and mtDNA

SEQ ID NO: 80036 - DNA, 120 bp, Homo sapiens
  misc_feature: 520 for SV(C|O) and mtDNA
ctgaggggccacagtaattacaaacttactatccgccatcccatacattgggacagacctagttcaatgaatctgaggaggctactcagtagacagtcccaccctcacacgattctttac

SEQ ID NO: 80037 - DNA, 120 bp, Homo sapiens
  misc_feature: 520 for SV(C|O) and mtDNA
ggggtagagggggtgctatagggtaaatacgggccctatttcaaagatttttaggggaattaattctaggacgatgggcatgaaactgtggtttgctccacagatttcagagcattgacc

SEQ ID NO: 80038 - DNA, 120 bp, Homo sapiens
  misc_feature: 520 for SV(C|O) and mtDNA
aattaggtctccacccctgactcccctcagccatagaaggccccaccccagtctcagccctactccactcaagcactatagttgtagcaggaatcttcttactcatccgcttccaccccc

SEQ ID NO: 80039 - DNA, 120 bp, Homo sapiens
  misc_feature: 520 for SV(C|O) and mtDNA
gctttgaagaaggcgtgggtacagatgtgcaggaatgctaggtgtggttggttgatgccgattgtaactattatgagtcctagttgacttgaagtggagaaggctacgatttttttgatg

SEQ ID NO: 80040 - DNA, 120 bp, Homo sapiens
  misc_feature: 520 for SV(C|O) and mtDNA
gctacctccctgacaagcgcctatagcactcgaataattcttctcaccctaacaggtcaacctcgcttccccacccttactaacattaacgaaaataaccccaccctactaaaccccatt

SEQ ID NO: 80041 - DNA, 120 bp, Homo sapiens
  misc_feature: 520 for SV(C|O) and mtDNA
cacagtttcatgcccatcgtcctagaattaattcccctaaaaatctttgaaatagggcccgtatttaccctatagcaccccctctaccccctctagagcccactgtaaagctaacttagc

SEQ ID NO: 80042 - DNA, 120 bp, Homo sapiens; identical to SEQ ID NO: 62643
  misc_feature: 520 for SV(C|O) and mtDNA

SEQ ID NO: 80043 - DNA, 120 bp, Homo sapiens
  misc_feature: 520 for SV(C|O) and mtDNA
gagggggtagagggggtgctatagggtaaatacgggccctatttcaaagatttttaggggaattaattctaggacgatgggcatgaaactgtggtttgctccacagatttcagagcattg

SEQ ID NO: 80044 - DNA, 120 bp, Homo sapiens
  misc_feature: 520 for SV(C|O) and mtDNA
cccgtttcgtgcaagaataggaggtggagtgctgctagggctgcaataatgaagggcaagatgaagtgaaaggtaaagaatcgtgtgagggtgggactgtctactgagtagcctcctcag

SEQ ID NO: 80045 - DNA, 120 bp, Homo sapiens
  misc_feature: 520 for SV(C|O) and mtDNA
ccgtcctaatcacagcagtcctacttctcctatctctcccagtcctagctgctggcatcactatactactaacagaccgcaacctcaacaccaccttcttcgaccccgccggaggaggag

SEQ ID NO: 80046 - DNA, 120 bp, Homo sapiens
  misc_feature: 520 for SV(C|O) and mtDNA
cggcggactaatcttcaactcctacatacttcccccattattcctagaaccaggcgacctgcgactccttgacgttgacaatcgagtagtactcccgattgaagcccccattcgtataat

SEQ ID NO: 80047 - DNA, 120 bp, Homo sapiens
  misc_feature: 520 for SV(C|O) and mtDNA
ccattggcgtgaaggtagcggatgattcagccataatttacgtctcgagtgatgtgggcgattgatgaaaaggcggttgaggcgtctggtgagtagtgcatggctaggaatagtcctgtg

SEQ ID NO: 80048 - DNA, 120 bp, Homo sapiens; identical to SEQ ID NO: 56273
  misc_feature: 520 for SV(C|O) and mtDNA

SEQ ID NO: 80049 - DNA, 120 bp, Homo sapiens
  misc_feature: 520 for SV(C|O) and mtDNA
aaaatgacatcaaaaaaatcgtagccttctccacttcaagtcaactaggactcataatagttacaatcggcatcaaccaaccacacctagcattcctgcacatctgtacccacgccttct

SEQ ID NO: 80050 - DNA, 120 bp, Homo sapiens
  misc_feature: 520 for SV(C|O) and mtDNA
aagatttttaggggaattaattctaggacgatgggcatgaaactgtggtttgctccacagatttcagagcattgaccgtagtatacccccggtcgtgtagcggtgaaagtggtttggttt

SEQ ID NO: 80051 - DNA, 120 bp, Homo sapiens
  misc_feature: 519 for SV(C|O) and mtDNA
tttgttaggtactgtttgcattaataaattaaagctccatagggtcttctcgtcttgctgtgtcatgcccgcctcttcacgggcaggtcaatttcactggttaaaagtaagagacagctg

SEQ ID NO: 80052 - DNA, 120 bp, Homo sapiens; identical to SEQ ID NO: 59651
  misc_feature: 519 for SV(C|O) and mtDNA

SEQ ID NO: 80053 - DNA, 120 bp, Homo sapiens
  misc_feature: 519 for SV(C|O) and mtDNA
tctactcccactaatagctttttgatgacttctagcaagcctcgctaacctcgccttaccccccactattaacctactgggagaactctctgtgctagtaaccacgttctcctgatcaaa

SEQ ID NO: 80054 - DNA, 120 bp, Homo sapiens
  misc_feature: 519 for SV(C|O) and mtDNA
tttcactgtaaagaggtgttggttctcttaatctttaacttaaaaggttaatgctaagttagctttacagtgggctctagagggggtagagggggtgctatagggtaaatacgggcccta

SEQ ID NO: 80055 - DNA, 120 bp, Homo sapiens
  misc_feature: 519 for SV(C|O) and mtDNA
tttattataataatgtttgtgtattcggctatgaagaataaggcgaaggggcctgcggcgtattcgatgttgaagcctgagactagttcggactctccttcggcaaggtcgaagggggtt

SEQ ID NO: 80056 - DNA, 120 bp, Homo sapiens
  misc_feature: 519 for SV(C|O) and mtDNA
tttaacctctccacccttatcacaacacaagaacacctctgattactcctgccatcatgacccttggccataatatgatttatctccacactagcagagaccaaccgaacccccttcgac

SEQ ID NO: 80057 - DNA, 120 bp, Homo sapiens
  misc_feature: 519 for SV(C|O) and mtDNA
aactaagctatactaaccccagggttggtcaatttcgtgccagccaccgcggtcacacgattaacccaagtcaatagaagccggcgtaaagagtgttttagatcaccccctccccaataa

SEQ ID NO: 80058 - DNA, 120 bp, Homo sapiens
  misc_feature: 519 for SV(C|O) and mtDNA
ttacacaaaatgacatcaaaaaaatcgtagccttctccacttcaagtcaactaggactcataatagttacaatcggcatcaaccaaccacacctagcattcctgcacatctgtacccacg

SEQ ID NO: 80059 - DNA, 120 bp, Homo sapiens; identical to SEQ ID NO: 62991
  misc_feature: 519 for SV(C|O) and mtDNA

SEQ ID NO: 80060 - DNA, 120 bp, Homo sapiens
  misc_feature: 519 for SV(C|O) and mtDNA
tggttactagcacagagagttctcccagtaggttaatagtggggggtaaggcgaggttagcgaggcttgctagaagtcatcaaaaagctattagtgggagtagagtttgaagtccttgag

SEQ ID NO: 80061 - DNA, 120 bp, Homo sapiens
  misc_feature: 519 for SV(C|O) and mtDNA
tggtactgaacctacgagtacaccgactacggcggactaatcttcaactcctacatacttcccccattattcctagaaccaggcgacctgcgactccttgacgttgacaatcgagtagta

SEQ ID NO: 80062 - DNA, 120 bp, Homo sapiens; identical to SEQ ID NO: 61320
  misc_feature: 519 for SV(C|O) and mtDNA

SEQ ID NO: 80063 - DNA, 120 bp, Homo sapiens
  misc_feature: 519 for SV(C|O) and mtDNA
tgctttctcgtgttacatcgcgccatcattggtatatggttagtgtgttggttagtaggcctagtatgaggagcgttatggagtggaagtgaaatcacatggctaggccggaggtcatta

SEQ ID NO: 80064 - DNA, 120 bp, Homo sapiens
  misc_feature: 519 for SV(C|O) and mtDNA
gccaaatatcattctgaggggccacagtaattacaaacttactatccgccatcccatacattgggacagacctagttcaatgaatctgaggaggctactcagtagacagtcccaccctca

SEQ ID NO: 80065 - DNA, 120 bp, Homo sapiens
  misc_feature: 519 for SV(C|O) and mtDNA
tcccgtttcgtgcaagaataggaggtggagtgctgctagggctgcaataatgaagggcaagatgaagtgaaaggtaaagaatcgtgtgagggtgggactgtctactgagtagcctcctca

SEQ ID NO: 80066 - DNA, 120 bp, Homo sapiens
  misc_feature: 519 for SV(C|O) and mtDNA
gctcaccctgatcagaggattgagtaaacggctaggctagaggtggctagaataaataggaggcctaggttgaggttgaccagggggttgggtatggggaggggggttcatagtagaaga

SEQ ID NO: 80067 - DNA, 120 bp, Homo sapiens
  misc_feature: 519 for SV(C|O) and mtDNA
tcttcaactcctacatacttcccccattattcctagaaccaggcgacctgcgactccttgacgttgacaatcgagtagtactcccgattgaagcccccattcgtataataattacatcac

SEQ ID NO: 80068 - DNA, 120 bp, Homo sapiens
  misc_feature: 519 for SV(C|O) and mtDNA
cgtcctaatcacagcagtcctacttctcctatctctcccagtcctagctgctggcatcactatactactaacagaccgcaacctcaacaccaccttcttcgaccccgccggaggaggaga

SEQ ID NO: 80069 - DNA, 120 bp, Homo sapiens; identical to SEQ ID NO: 61767
  misc_feature: 519 for SV(C|O) and mtDNA

SEQ ID NO: 80070 - DNA, 120 bp, Homo sapiens; identical to SEQ ID NO: 59426
  misc_feature: 519 for SV(C|O) and mtDNA

SEQ ID NO: 80071 - DNA, 120 bp, Homo sapiens
  misc_feature: 519 for SV(C|O) and mtDNA
agggggtagagggggtgctatagggtaaatacgggccctatttcaaagatttttaggggaattaattctaggacgatgggcatgaaactgtggtttgctccacagatttcagagcattga

SEQ ID NO: 80072 - DNA, 120 bp, Homo sapiens; identical to SEQ ID NO: 62632
  misc_feature: 519 for SV(C|O) and mtDNA

SEQ ID NO: 80073 - DNA, 120 bp, Homo sapiens
  misc_feature: 519 for SV(C|O) and mtDNA
tacacaaaatgacatcaaaaaaatcgtagccttctccacttcaagtcaactaggactcataatagttacaatcggcatcaaccaaccacacctagcattcctgcacatctgtacccacgc

SEQ ID NO: 80074 - DNA, 120 bp, Homo sapiens; identical to SEQ ID NO: 61734
  misc_feature: 519 for SV(C|O) and mtDNA

SEQ ID NO: 80075 - DNA, 120 bp, Homo sapiens
  misc_feature: 519 for SV(C|O) and mtDNA
agttgaggtggattaaaccaaacccagctacgcaaaatcttagcatactcctcaattacccacataggatgaataatagcagttctaccgtacaaccctaacataaccattcttaattta

SEQ ID NO: 80076 - DNA, 120 bp, Homo sapiens
  misc_feature: 519 for SV(C|O) and mtDNA
agatttttaggggaattaattctaggacgatgggcatgaaactgtggtttgctccacagatttcagagcattgaccgtagtatacccccggtcgtgtagcggtgaaagtggtttggttta

SEQ ID NO: 80077 - DNA, 120 bp, Homo sapiens; identical to SEQ ID NO: 60876
  misc_feature: 519 for SV(C|O) and mtDNA

SEQ ID NO: 80078 - DNA, 120 bp, Homo sapiens
  misc_feature: 519 for SV(C|O) and mtDNA
acacaaaatgacatcaaaaaaatcgtagccttctccacttcaagtcaactaggactcataatagttacaatcggcatcaaccaaccacacctagcattcctgcacatctgtacccacgcc

SEQ ID NO: 80079 - DNA, 120 bp, Homo sapiens
  misc_feature: 519 for SV(C|O) and mtDNA
ggaagaagaaagagaggaagtaaagtttaattatgcctttttgggttgaggtgatgatggaggtggagatttggtgctgtgaaattgttttaggtaatagcttttctagtcaggttaggt

SEQ ID NO: 80080 - DNA, 120 bp, Homo sapiens
  misc_feature: 519 for SV(C|O) and mtDNA
gctttctcgtgttacatcgcgccatcattggtatatggttagtgtgttggttagtaggcctagtatgaggagcgttatggagtggaagtgaaatcacatggctaggccggaggtcattag

SEQ ID NO: 80081 - DNA, 120 bp, Homo sapiens
  misc_feature: 519 for SV(C|O) and mtDNA
gcggatgattcagccataatttacgtctcgagtgatgtgggcgattgatgaaaaggcggttgaggcgtctggtgagtagtgcatggctaggaatagtcctgtggtgatttggaggatcag

SEQ ID NO: 80082 - DNA, 120 bp, Homo sapiens; identical to SEQ ID NO: 60096
  misc_feature: 519 for SV(C|O) and mtDNA

SEQ ID NO: 80083 - DNA, 120 bp, Homo sapiens; identical to SEQ ID NO: 62759
  misc_feature: 519 for SV(C|O) and mtDNA

SEQ ID NO: 80084 - DNA, 120 bp, Homo sapiens; identical to SEQ ID NO: 54267
  misc_feature: 519 for SV(C|O) and mtDNA

SEQ ID NO: 80085 - DNA, 120 bp, Homo sapiens
  misc_feature: 519 for SV(C|O) and mtDNA
cgggagaagccccggcaggtttgaagctgcttcttcgaatttgcaattcaatatgaaaatcacctcggagctggtaaaaagaggcctaacccctgtctttagatttacagtccaatgctt

SEQ ID NO: 80086 - DNA, 120 bp, Homo sapiens
  misc_feature: 519 for SV(C|O) and mtDNA
aggggaattaattctaggacgatgggcatgaaactgtggtttgctccacagatttcagagcattgaccgtagtatacccccggtcgtgtagcggtgaaagtggtttggtttagacgtccg

SEQ ID NO: 80087 - DNA, 120 bp, Homo sapiens
  misc_feature: 519 for SV(C|O) and mtDNA
cctccttaacctctacttctacctacgcctaatctactccacctcaatcacactactccccatatctaacaacgtaaaaataaaatgacagtttgaacatacaaaacccaccccattcct

SEQ ID NO: 80088 - DNA, 120 bp, Homo sapiens; identical to SEQ ID NO: 53575
  misc_feature: 519 for SV(C|O) and mtDNA

SEQ ID NO: 80089 - DNA, 120 bp, Homo sapiens
  misc_feature: 519 for SV(C|O) and mtDNA
caggtgagttttagctttattggggagggggtgatctaaaacactctttacgccggcttctattgacttgggttaatcgtgtgaccgcggtggctggcacgaaattgaccaaccctgggg

SEQ ID NO: 80090 - DNA, 120 bp, Homo sapiens
  misc_feature: 519 for SV(C|O) and mtDNA
aataatgtttgtgtattcggctatgaagaataaggcgaaggggcctgcggcgtattcgatgttgaagcctgagactagttcggactctccttcggcaaggtcgaagggggttcggttggt

SEQ ID NO: 80091 - DNA, 120 bp, Homo sapiens
  misc_feature: 519 for SV(C|O) and mtDNA
aatagtatggctttgaagaaggcgtgggtacagatgtgcaggaatgctaggtgtggttggttgatgccgattgtaactattatgagtcctagttgacttgaagtggagaaggctacgatt

SEQ ID NO: 80092 - DNA, 120 bp, Homo sapiens
  misc_feature: 518 for SV(C|O) and mtDNA
ttgtgtattcggctatgaagaataaggcgaaggggcctgcggcgtattcgatgttgaagcctgagactagttcggactctccttcggcaaggtcgaagggggttcggttggtctctgcta

SEQ ID NO: 80093 - DNA, 120 bp, Homo sapiens
  misc_feature: 518 for SV(C|O) and mtDNA
tgacatcaaaaaaatcgtagccttctccacttcaagtcaactaggactcataatagttacaatcggcatcaaccaaccacacctagcattcctgcacatctgtacccacgccttcttcaa

SEQ ID NO: 80094 - DNA, 120 bp, Homo sapiens
  misc_feature: 518 for SV(C|O) and mtDNA
tgtaaagaggtgttggttctcttaatctttaacttaaaaggttaatgctaagttagctttacagtgggctctagagggggtagagggggtgctatagggtaaatacgggccctatttcaa

SEQ ID NO: 80095 - DNA, 120 bp, Homo sapiens
  misc_feature: 518 for SV(C|O) and mtDNA
cccatgcctcaggatactcctcaatagccatcgctgtagtatatccaaagacaaccatcattccccctaaataaattaaaaaaactattaaacccatataacctcccccaaaattcagaa

SEQ ID NO: 80096 - DNA, 120 bp, Homo sapiens
  misc_feature: 518 for SV(C|O) and mtDNA
ttctactccaaagaccacatcatcgaaaccgcaaacatatcatacacaaacgcctgagccctatctattactctcatcgctacctccctgacaagcgcctatagcactcgaataattctt

SEQ ID NO: 80097 - DNA, 120 bp, Homo sapiens; identical to SEQ ID NO: 62737
  misc_feature: 518 for SV(C|O) and mtDNA

SEQ ID NO: 80098 - DNA, 120 bp, Homo sapiens; identical to SEQ ID NO: 58729
  misc_feature: 518 for SV(C|O) and mtDNA

SEQ ID NO: 80099 - DNA, 120 bp, Homo sapiens
  misc_feature: 518 for SV(C|O) and mtDNA
ccttacacaaaatgacatcaaaaaaatcgtagccttctccacttcaagtcaactaggactcataatagttacaatcggcatcaaccaaccacacctagcattcctgcacatctgtaccca

SEQ ID NO: 80100 - DNA, 120 bp, Homo sapiens
  misc_feature: 518 for SV(C|O) and mtDNA
tgattcagccataatttacgtctcgagtgatgtgggcgattgatgaaaaggcggttgaggcgtctggtgagtagtgcatggctaggaatagtcctgtggtgatttggaggatcaggcagg

SEQ ID NO: 80101 - DNA, 120 bp, Homo sapiens
  misc_feature: 518 for SV(C|O) and mtDNA
tgaggcgccattggcgtgaaggtagcggatgattcagccataatttacgtctcgagtgatgtgggcgattgatgaaaaggcggttgaggcgtctggtgagtagtgcatggctaggaatag

SEQ ID NO: 80102 - DNA, 120 bp, Homo sapiens; identical to SEQ ID NO: 59635
  misc_feature: 518 for SV(C|O) and mtDNA

SEQ ID NO: 80103 - DNA, 120 bp, Homo sapiens
  misc_feature: 518 for SV(C|O) and mtDNA
ccacacctagcattcctgcacatctgtacccacgccttcttcaaagccatactatttatgtgctccgggtccatcatccacaaccttaacaatgaacaagatatccgaaaaataggagga

SEQ ID NO: 80104 - DNA, 120 bp, Homo sapiens
  misc_feature: 518 for SV(C|O) and mtDNA
tattgtgtgttcagatatgttaaagccactttcgtagtctattttgtgtcagctggagttttttacaactcaggtgagttttagctttattggggagggggtgatctaaaacactcttta

SEQ ID NO: 80105 - DNA, 120 bp, Homo sapiens
  misc_feature: 518 for SV(C|O) and mtDNA
tattactctcatcgctacctccctgacaagcgcctatagcactcgaataattcttctcaccctaacaggtcaacctcgcttccccacccttactaacattaacgaaaataaccccaccct

SEQ ID NO: 80106 - DNA, 120 bp, Homo sapiens
  misc_feature: 518 for SV(C|O) and mtDNA
agctatactaaccccagggttggtcaatttcgtgccagccaccgcggtcacacgattaacccaagtcaatagaagccggcgtaaagagtgttttagatcaccccctccccaataaagcta

SEQ ID NO: 80107 - DNA, 120 bp, Homo sapiens
  misc_feature: 518 for SV(C|O) and mtDNA
gcgctgtgatgagtgtgcctgcaaagatggtagagtagatgacgggttgggccaggggattaattagtacgggaagggtataaccaacattttcggggtatgggcccgatagcttattta

SEQ ID NO: 80108 - DNA, 120 bp, Homo sapiens; identical to SEQ ID NO: 62184
  misc_feature: 518 for SV(C|O) and mtDNA

SEQ ID NO: 80109 - DNA, 120 bp, Homo sapiens
  misc_feature: 518 for SV(C|O) and mtDNA
gtttctactccaaagaccacatcatcgaaaccgcaaacatatcatacacaaacgcctgagccctatctattactctcatcgctacctccctgacaagcgcctatagcactcgaataattc

SEQ ID NO: 80110 - DNA, 120 bp, Homo sapiens
  misc_feature: 518 for SV(C|O) and mtDNA
gtatggctttgaagaaggcgtgggtacagatgtgcaggaatgctaggtgtggttggttgatgccgattgtaactattatgagtcctagttgacttgaagtggagaaggctacgatttttt

SEQ ID NO: 80111 - DNA, 120 bp, Homo sapiens
  misc_feature: 518 for SV(C|O) and mtDNA
ggggcctgcggcgtattcgatgttgaagcctgagactagttcggactctccttcggcaaggtcgaagggggttcggttggtctctgctagtgtggagataaatcatattatggccaaggg

SEQ ID NO: 80112 - DNA, 120 bp, Homo sapiens; identical to SEQ ID NO: 60578
  misc_feature: 518 for SV(C|O) and mtDNA

SEQ ID NO: 80113 - DNA, 120 bp, Homo sapiens
  misc_feature: 518 for SV(C|O) and mtDNA
gcgtgaaggtagcggatgattcagccataatttacgtctcgagtgatgtgggcgattgatgaaaaggcggttgaggcgtctggtgagtagtgcatggctaggaatagtcctgtggtgatt

SEQ ID NO: 80114 - DNA, 120 bp, Homo sapiens
  misc_feature: 518 for SV(C|O) and mtDNA
gcacaccccccagacgaaaataccaaatgcatggagagctcccgtgagtggttaatagggtgatagacctgtgatccatcgtgatgtcttatttaaggggaacgtgtgggctatttaggc

SEQ ID NO: 80115 - DNA, 120 bp, Homo sapiens
  misc_feature: 518 for SV(C|O) and mtDNA
gcagttgaggtggattaaaccaaacccagctacgcaaaatcttagcatactcctcaattacccacataggatgaataatagcagttctaccgtacaaccctaacataaccattcttaatt

SEQ ID NO: 80116 - DNA, 120 bp, Homo sapiens
  misc_feature: 518 for SV(C|O) and mtDNA
gatttttaggggaattaattctaggacgatgggcatgaaactgtggtttgctccacagatttcagagcattgaccgtagtatacccccggtcgtgtagcggtgaaagtggtttggtttag

SEQ ID NO: 80117 - DNA, 120 bp, Homo sapiens
  misc_feature: 518 for SV(C|O) and mtDNA
atacccaaccccctggtcaacctcaacctaggcctcctatttattctagccacctctagcctagccgtttactcaatcctctgatcagggtgagcatcaaactcaaactacgccctgatc

SEQ ID NO: 80118 - DNA, 120 bp, Homo sapiens
  misc_feature: 518 for SV(C|O) and mtDNA
gaaagagaggaagtaaagtttaattatgcctttttgggttgaggtgatgatggaggtggagatttggtgctgtgaaattgttttaggtaatagcttttctagtcaggttaggtctaggag

SEQ ID NO: 80119 - DNA, 120 bp, Homo sapiens
  misc_feature: 518 for SV(C|O) and mtDNA
aatatcattctgaggggccacagtaattacaaacttactatccgccatcccatacattgggacagacctagttcaatgaatctgaggaggctactcagtagacagtcccaccctcacacg

SEQ ID NO: 80120 - DNA, 120 bp, Homo sapiens
  misc_feature: 518 for SV(C|O) and mtDNA
cgtgaaggtagcggatgattcagccataatttacgtctcgagtgatgtgggcgattgatgaaaaggcggttgaggcgtctggtgagtagtgcatggctaggaatagtcctgtggtgattt

SEQ ID NO: 80121 - DNA, 120 bp, Homo sapiens
  misc_feature: 518 for SV(C|O) and mtDNA
cggatgattcagccataatttacgtctcgagtgatgtgggcgattgatgaaaaggcggttgaggcgtctggtgagtagtgcatggctaggaatagtcctgtggtgatttggaggatcagg

SEQ ID NO: 80122 - DNA, 120 bp, Homo sapiens
  misc_feature: 518 for SV(C|O) and mtDNA
aggcgaaggggcctgcggcgtattcgatgttgaagcctgagactagttcggactctccttcggcaaggtcgaagggggttcggttggtctctgctagtgtggagataaatcatattatgg

SEQ ID NO: 80123 - DNA, 120 bp, Homo sapiens
  misc_feature: 518 for SV(C|O) and mtDNA
catcatccctctactattttttaaccaaatcaacaacaacctatttagctgttccccaaccttttcctccgaccccctaacaacccccctcctaatactaactacctgactcctacccct

SEQ ID NO: 80124 - DNA, 120 bp, Homo sapiens
  misc_feature: 518 for SV(C|O) and mtDNA
attctgaggggccacagtaattacaaacttactatccgccatcccatacattgggacagacctagttcaatgaatctgaggaggctactcagtagacagtcccaccctcacacgattctt

SEQ ID NO: 80125 - DNA, 120 bp, Homo sapiens
  misc_feature: 518 for SV(C|O) and mtDNA
attaggtctccacccctgactcccctcagccatagaaggccccaccccagtctcagccctactccactcaagcactatagttgtagcaggaatcttcttactcatccgcttccaccccct

SEQ ID NO: 80126 - DNA, 120 bp, Homo sapiens; identical to SEQ ID NO: 61919
  misc_feature: 518 for SV(C|O) and mtDNA

SEQ ID NO: 80127 - DNA, 120 bp, Homo sapiens
  misc_feature: 517 for SV(C|O) and mtDNA
ttggctcgtaagaaggcctagataggggattgtgcggtgtgtgatggtagggtagaatccgagtatgttggagaaataaaatgtgcatagtggggattttattttaagtttgttggttag

SEQ ID NO: 80128 - DNA, 120 bp, Homo sapiens
  misc_feature: 517 for SV(C|O) and mtDNA
ttgacgttgacaatcgagtagtactcccgattgaagcccccattcgtataataattacatcacaagacgtcttgcactcatgagctgtccccacattaggcttaaaaacagatgcaattc

SEQ ID NO: 80129 - DNA, 120 bp, Homo sapiens; identical to SEQ ID NO: 54216
  misc_feature: 517 for SV(C|O) and mtDNA

SEQ ID NO: 80130 - DNA, 120 bp, Homo sapiens
  misc_feature: 517 for SV(C|O) and mtDNA
ttcactgtaaagaggtgttggttctcttaatctttaacttaaaaggttaatgctaagttagctttacagtgggctctagagggggtagagggggtgctatagggtaaatacgggccctat

SEQ ID NO: 80131 - DNA, 120 bp, Homo sapiens
  misc_feature: 517 for SV(C|O) and mtDNA
ttaccatcaaatcaattggccaccaatggtactgaacctacgagtacaccgactacggcggactaatcttcaactcctacatacttcccccattattcctagaaccaggcgacctgcgac

SEQ ID NO: 80132 - DNA, 120 bp, Homo sapiens
  misc_feature: 517 for SV(C|O) and mtDNA
tacctccctgacaagcgcctatagcactcgaataattcttctcaccctaacaggtcaacctcgcttccccacccttactaacattaacgaaaataaccccaccctactaaaccccattaa

SEQ ID NO: 80133 - DNA, 120 bp, Homo sapiens
  misc_feature: 517 for SV(C|O) and mtDNA
tggtgacaaaatatgttgtgtagagttcaggggagagtgcgtcatatgttgttcctaggaagattgtagtggtgagggtgtttattataataatgtttgtgtattcggctatgaagaata

SEQ ID NO: 80134 - DNA, 120 bp, Homo sapiens; identical to SEQ ID NO: 62770
  misc_feature: 517 for SV(C|O) and mtDNA

SEQ ID NO: 80135 - DNA, 120 bp, Homo sapiens
  misc_feature: 517 for SV(C|O) and mtDNA
acagtttcatgcccatcgtcctagaattaattcccctaaaaatctttgaaatagggcccgtatttaccctatagcaccccctctaccccctctagagcccactgtaaagctaacttagca

SEQ ID NO: 80136 - DNA, 120 bp, Homo sapiens
  misc_feature: 517 for SV(C|O) and mtDNA
aaccccctggtcaacctcaacctaggcctcctatttattctagccacctctagcctagccgtttactcaatcctctgatcagggtgagcatcaaactcaaactacgccctgatcggcgca

SEQ ID NO: 80137 - DNA, 120 bp, Homo sapiens
  misc_feature: 517 for SV(C|O) and mtDNA
tgacaaaatatgttgtgtagagttcaggggagagtgcgtcatatgttgttcctaggaagattgtagtggtgagggtgtttattataataatgtttgtgtattcggctatgaagaataagg

SEQ ID NO: 80138 - DNA, 120 bp, Homo sapiens
  misc_feature: 517 for SV(C|O) and mtDNA
caaactctactcccactaatagctttttgatgacttctagcaagcctcgctaacctcgccttaccccccactattaacctactgggagaactctctgtgctagtaaccacgttctcctga

SEQ ID NO: 80139 - DNA, 120 bp, Homo sapiens
  misc_feature: 517 for SV(C|O) and mtDNA
gtggttactagcacagagagttctcccagtaggttaatagtggggggtaaggcgaggttagcgaggcttgctagaagtcatcaaaaagctattagtgggagtagagtttgaagtccttga

SEQ ID NO: 80140 - DNA, 120 bp, Homo sapiens
  misc_feature: 517 for SV(C|O) and mtDNA
tcaaactctactcccactaatagctttttgatgacttctagcaagcctcgctaacctcgccttaccccccactattaacctactgggagaactctctgtgctagtaaccacgttctcctg

SEQ ID NO: 80141 - DNA, 120 bp, Homo sapiens
  misc_feature: 517 for SV(C|O) and mtDNA
taggcttccggctgtcaggcgtttaatggggtttagtagggtggggttattttcgttaatgttagtaagggtggggaagcgaggttgacctgttagggtgagaagaattattcgagtgct

SEQ ID NO: 80142 - DNA, 120 bp, Homo sapiens
  misc_feature: 517 for SV(C|O) and mtDNA
taagttacaatatgggagattattccgaagcctggtaggataagaatataaacttcagggtgaccgaaaaatcagaataggtgttggtatagaatggggtctcctcctccggcggggtcg

SEQ ID NO: 80143 - DNA, 120 bp, Homo sapiens
  misc_feature: 517 for SV(C|O) and mtDNA
atcctccaaatcaccacaggactattcctagccatgcactactcaccagacgcctcaaccgccttttcatcaatcgcccacatcactcgagacgtaaattatggctgaatcatccgctac

SEQ ID NO: 80144 - DNA, 120 bp, Homo sapiens; identical to SEQ ID NO: 59958
  misc_feature: 517 for SV(C|O) and mtDNA

SEQ ID NO: 80145 - DNA, 120 bp, Homo sapiens
  misc_feature: 517 for SV(C|O) and mtDNA
attgtgtgttcagatatgttaaagccactttcgtagtctattttgtgtcagctggagttttttacaactcaggtgagttttagctttattggggagggggtgatctaaaacactctttac

SEQ ID NO: 80146 - DNA, 120 bp, Homo sapiens; identical to SEQ ID NO: 61482
  misc_feature: 517 for SV(C|O) and mtDNA

SEQ ID NO: 80147 - DNA, 120 bp, Homo sapiens
  misc_feature: 517 for SV(C|O) and mtDNA
gggtttgttaggtactgtttgcattaataaattaaagctccatagggtcttctcgtcttgctgtgtcatgcccgcctcttcacgggcaggtcaatttcactggttaaaagtaagagacag

SEQ ID NO: 80148 - DNA, 120 bp, Homo sapiens
  misc_feature: 517 for SV(C|O) and mtDNA
ccatcaaatcaattggccaccaatggtactgaacctacgagtacaccgactacggcggactaatcttcaactcctacatacttcccccattattcctagaaccaggcgacctgcgactcc

SEQ ID NO: 80149 - DNA, 120 bp, Homo sapiens; identical to SEQ ID NO: 59645
  misc_feature: 517 for SV(C|O) and mtDNA

SEQ ID NO: 80150 - DNA, 120 bp, Homo sapiens
  misc_feature: 517 for SV(C|O) and mtDNA
atcccgtttcgtgcaagaataggaggtggagtgctgctagggctgcaataatgaagggcaagatgaagtgaaaggtaaagaatcgtgtgagggtgggactgtctactgagtagcctcctc

SEQ ID NO: 80151 - DNA, 120 bp, Homo sapiens
  misc_feature: 517 for SV(C|O) and mtDNA
gaagaagaaagagaggaagtaaagtttaattatgcctttttgggttgaggtgatgatggaggtggagatttggtgctgtgaaattgttttaggtaatagcttttctagtcaggttaggtc

SEQ ID NO: 80152 - DNA, 120 bp, Homo sapiens
  misc_feature: 517 for SV(C|O) and mtDNA
ctttgaagaaggcgtgggtacagatgtgcaggaatgctaggtgtggttggttgatgccgattgtaactattatgagtcctagttgacttgaagtggagaaggctacgatttttttgatgt

SEQ ID NO: 80153 - DNA, 120 bp, Homo sapiens
  misc_feature: 517 for SV(C|O) and mtDNA
aatggtactgaacctacgagtacaccgactacggcggactaatcttcaactcctacatacttcccccattattcctagaaccaggcgacctgcgactccttgacgttgacaatcgagtag

SEQ ID NO: 80154 - DNA, 120 bp, Homo sapiens
  misc_feature: 517 for SV(C|O) and mtDNA
ccacagtttcatgcccatcgtcctagaattaattcccctaaaaatctttgaaatagggcccgtatttaccctatagcaccccctctaccccctctagagcccactgtaaagctaacttag

SEQ ID NO: 80155 - DNA, 120 bp, Homo sapiens
  misc_feature: 517 for SV(C|O) and mtDNA
caaccaaccacacctagcattcctgcacatctgtacccacgccttcttcaaagccatactatttatgtgctccgggtccatcatccacaaccttaacaatgaacaagatatccgaaaaat

SEQ ID NO: 80156 - DNA, 120 bp, Homo sapiens
  misc_feature: 517 for SV(C|O) and mtDNA
aaaccacagtttcatgcccatcgtcctagaattaattcccctaaaaatctttgaaatagggcccgtatttaccctatagcaccccctctaccccctctagagcccactgtaaagctaact

SEQ ID NO: 80157 - DNA, 120 bp, Homo sapiens
  misc_feature: 517 for SV(C|O) and mtDNA
aagctatactaaccccagggttggtcaatttcgtgccagccaccgcggtcacacgattaacccaagtcaatagaagccggcgtaaagagtgttttagatcaccccctccccaataaagct

SEQ ID NO: 80158 - DNA, 120 bp, Homo sapiens
  misc_feature: 517 for SV(C|O) and mtDNA
aagttttttcataggaggtgtatgagttggtcgtagcggaatcgggggtatgctgttcgaattcataagaacagggaggttagaagtagggtcttggtgacaaaatatgttgtgtagagt

SEQ ID NO: 80159 - DNA, 120 bp, Homo sapiens
  misc_feature: 517 for SV(C|O) and mtDNA
aagagtgctactctcctcgctccgggcccataacacttgggggtagctaaagtgaactgtatccgacatctggttcctacttcagggccataaagcctaaatagcccacacgttcccctt

SEQ ID NO: 80160 - DNA, 120 bp, Homo sapiens
  misc_feature: 516 for SV(C|O) and mtDNA
ctctactcccactaatagctttttgatgacttctagcaagcctcgctaacctcgccttaccccccactattaacctactgggagaactctctgtgctagtaaccacgttctcctgatcaa

SEQ ID NO: 80161 - DNA, 120 bp, Homo sapiens
  misc_feature: 516 for SV(C|O) and mtDNA
ttgaggcgccattggcgtgaaggtagcggatgattcagccataatttacgtctcgagtgatgtgggcgattgatgaaaaggcggttgaggcgtctggtgagtagtgcatggctaggaata

SEQ ID NO: 80162 - DNA, 120 bp, Homo sapiens
  misc_feature: 516 for SV(C|O) and mtDNA
ctctcatcgctacctccctgacaagcgcctatagcactcgaataattcttctcaccctaacaggtcaacctcgcttccccacccttactaacattaacgaaaataaccccaccctactaa

SEQ ID NO: 80163 - DNA, 120 bp, Homo sapiens
  misc_feature: 516 for SV(C|O) and mtDNA
ttagtaagattacacatgcaagcatccccgttccagtgagttcaccctctaaatcaccacgatcaaaagggacaagcatcaagcacgcagcaatgcagctcaaaacgcttagcctagcca

SEQ ID NO: 80164 - DNA, 120 bp, Homo sapiens
  misc_feature: 516 for SV(C|O) and mtDNA
agtgttttagatcaccccctccccaataaagctaaaactcacctgagttgtaaaaaactccagctgacacaaaatagactacgaaagtggctttaacatatctgaacacacaatagctaa

SEQ ID NO: 80165 - DNA, 120 bp, Homo sapiens
  misc_feature: 516 for SV(C|O) and mtDNA
ttactctcatcgctacctccctgacaagcgcctatagcactcgaataattcttctcaccctaacaggtcaacctcgcttccccacccttactaacattaacgaaaataaccccaccctac

SEQ ID NO: 80166 - DNA, 120 bp, Homo sapiens
  misc_feature: 516 for SV(C|O) and mtDNA
tggtaaatatgtagagggagtatagggctgtgactagtatgttgagtcctgtaagtaggagagtgatatttgatcaggagaacgtggttactagcacagagagttctcccagtaggttaa

SEQ ID NO: 80167 - DNA, 120 bp, Homo sapiens; identical to SEQ ID NO: 57226
  misc_feature: 516 for SV(C|O) and mtDNA

SEQ ID NO: 80168 - DNA, 120 bp, Homo sapiens
  misc_feature: 516 for SV(C|O) and mtDNA
gtgagtgagccccattgtgttgtggtaaatatgtagagggagtatagggctgtgactagtatgttgagtcctgtaagtaggagagtgatatttgatcaggagaacgtggttactagcaca

SEQ ID NO: 80169 - DNA, 120 bp, Homo sapiens
  misc_feature: 516 for SV(C|O) and mtDNA
tgtgatgtaattattatacgaatgggggcttcaatcgggagtactactcgattgtcaacgtcaaggagtcgcaggtcgcctggttctaggaataatgggggaagtatgtaggagttgaag

SEQ ID NO: 80170 - DNA, 120 bp, Homo sapiens
  misc_feature: 516 for SV(C|O) and mtDNA
tgcccccgctaaccggctttttgcccaaatgggccattatcgaagaattcacaaaaaacaatagcctcatcatccccaccatcatagccaccatcaccctccttaacctctacttctacc

SEQ ID NO: 80171 - DNA, 120 bp, Homo sapiens
  misc_feature: 516 for SV(C|O) and mtDNA
tcatccctctactattttttaaccaaatcaacaacaacctatttagctgttccccaaccttttcctccgaccccctaacaacccccctcctaatactaactacctgactcctacccctca

SEQ ID NO: 80172 - DNA, 120 bp, Homo sapiens; identical to SEQ ID NO: 56512
  misc_feature: 516 for SV(C|O) and mtDNA

SEQ ID NO: 80173 - DNA, 120 bp, Homo sapiens
  misc_feature: 516 for SV(C|O) and mtDNA
ctttaacctctccacccttatcacaacacaagaacacctctgattactcctgccatcatgacccttggccataatatgatttatctccacactagcagagaccaaccgaacccccttcga

SEQ ID NO: 80174 - DNA, 120 bp, Homo sapiens
  misc_feature: 516 for SV(C|O) and mtDNA
tcagggtgaccgaaaaatcagaataggtgttggtatagaatggggtctcctcctccggcggggtcgaagaaggtggtgttgaggttgcggtctgttagtagtatagtgatgccagcagct

SEQ ID NO: 80175 - DNA, 120 bp, Homo sapiens
  misc_feature: 516 for SV(C|O) and mtDNA
tcactgtaaagaggtgttggttctcttaatctttaacttaaaaggttaatgctaagttagctttacagtgggctctagagggggtagagggggtgctatagggtaaatacgggccctatt

SEQ ID NO: 80176 - DNA, 120 bp, Homo sapiens; identical to SEQ ID NO: 56977
  misc_feature: 516 for SV(C|O) and mtDNA

SEQ ID NO: 80177 - DNA, 120 bp, Homo sapiens; identical to SEQ ID NO: 61960
  misc_feature: 516 for SV(C|O) and mtDNA

SEQ ID NO: 80178 - DNA, 120 bp, Homo sapiens
  misc_feature: 516 for SV(C|O) and mtDNA
accacagtttcatgcccatcgtcctagaattaattcccctaaaaatctttgaaatagggcccgtatttaccctatagcaccccctctaccccctctagagcccactgtaaagctaactta

SEQ ID NO: 80179 - DNA, 120 bp, Homo sapiens; identical to SEQ ID NO: 62569
  misc_feature: 516 for SV(C|O) and mtDNA

SEQ ID NO: 80180 - DNA, 120 bp, Homo sapiens
  misc_feature: 516 for SV(C|O) and mtDNA
gtctcagccctactccactcaagcactatagttgtagcaggaatcttcttactcatccgcttccaccccctagcagaaaatagcccactaatccaaactctaacactatgcttaggcgct

SEQ ID NO: 80181 - DNA, 120 bp, Homo sapiens; identical to SEQ ID NO: 62730
  misc_feature: 516 for SV(C|O) and mtDNA

SEQ ID NO: 80182 - DNA, 120 bp, Homo sapiens
  misc_feature: 516 for SV(C|O) and mtDNA
ggcgggagaagccccggcaggtttgaagctgcttcttcgaatttgcaattcaatatgaaaatcacctcggagctggtaaaaagaggcctaacccctgtctttagatttacagtccaatgc

SEQ ID NO: 80183 - DNA, 120 bp, Homo sapiens; identical to SEQ ID NO: 57907
  misc_feature: 516 for SV(C|O) and mtDNA

SEQ ID NO: 80184 - DNA, 120 bp, Homo sapiens
  misc_feature: 516 for SV(C|O) and mtDNA
gctgtgatgagtgtgcctgcaaagatggtagagtagatgacgggttgggccaggggattaattagtacgggaagggtataaccaacattttcggggtatgggcccgatagcttatttagc

SEQ ID NO: 80185 - DNA, 120 bp, Homo sapiens
  misc_feature: 516 for SV(C|O) and mtDNA
gcctaagcatagtgttagagtttggattagtgggctattttctgctagggggtggaagcggatgagtaagaagattcctgctacaactatagtgcttgagtggagtagggctgagactgg

SEQ ID NO: 80186 - DNA, 120 bp, Homo sapiens
  misc_feature: 516 for SV(C|O) and mtDNA
gccaccaatggtactgaacctacgagtacaccgactacggcggactaatcttcaactcctacatacttcccccattattcctagaaccaggcgacctgcgactccttgacgttgacaatc

SEQ ID NO: 80187 - DNA, 120 bp, Homo sapiens
  misc_feature: 516 for SV(C|O) and mtDNA
gcaggaatgctaggtgtggttggttgatgccgattgtaactattatgagtcctagttgacttgaagtggagaaggctacgatttttttgatgtcattttgtgtaagggcgcagactgctg

SEQ ID NO: 80188 - DNA, 120 bp, Homo sapiens
  misc_feature: 516 for SV(C|O) and mtDNA
gaggttatatgggtttaatagtttttttaatttatttagggggaatgatggttgtctttggatatactacagcgatggctattgaggagtatcctgaggcatgggggtcaggggttgagg

SEQ ID NO: 80189 - DNA, 120 bp, Homo sapiens
  misc_feature: 516 for SV(C|O) and mtDNA
aatgacatcaaaaaaatcgtagccttctccacttcaagtcaactaggactcataatagttacaatcggcatcaaccaaccacacctagcattcctgcacatctgtacccacgccttcttc

SEQ ID NO: 80190 - DNA, 120 bp, Homo sapiens
  misc_feature: 516 for SV(C|O) and mtDNA
aataccaaatgcatggagagctcccgtgagtggttaatagggtgatagacctgtgatccatcgtgatgtcttatttaaggggaacgtgtgggctatttaggctttatggccctgaagtag

SEQ ID NO: 80191 - DNA, 120 bp, Homo sapiens
  misc_feature: 516 for SV(C|O) and mtDNA
ccaccaatggtactgaacctacgagtacaccgactacggcggactaatcttcaactcctacatacttcccccattattcctagaaccaggcgacctgcgactccttgacgttgacaatcg

SEQ ID NO: 80192 - DNA, 120 bp, Homo sapiens; identical to SEQ ID NO: 62896
  misc_feature: 516 for SV(C|O) and mtDNA

SEQ ID NO: 80193 - DNA, 120 bp, Homo sapiens; identical to SEQ ID NO: 61846
  misc_feature: 516 for SV(C|O) and mtDNA

SEQ ID NO: 80194 - DNA, 120 bp, Homo sapiens
  misc_feature: 516 for SV(C|O) and mtDNA
agacgtcttgtgatgtaattattatacgaatgggggcttcaatcgggagtactactcgattgtcaacgtcaaggagtcgcaggtcgcctggttctaggaataatgggggaagtatgtagg

SEQ ID NO: 80195 - DNA, 120 bp, Homo sapiens; identical to SEQ ID NO: 53773
  misc_feature: 516 for SV(C|O) and mtDNA

SEQ ID NO: 80196 - DNA, 120 bp, Homo sapiens
  misc_feature: 516 for SV(C|O) and mtDNA
ccatcatccacaaccttaacaatgaacaagatatccgaaaaataggaggactactcaaaaccatacctctcacttcaacctccctcaccattggcagcctagcattagcaggaatacctt

SEQ ID NO: 80197 - DNA, 120 bp, Homo sapiens
  misc_feature: 516 for SV(C|O) and mtDNA
catacccaaccccctggtcaacctcaacctaggcctcctatttattctagccacctctagcctagccgtttactcaatcctctgatcagggtgagcatcaaactcaaactacgccctgat

SEQ ID NO: 80198 - DNA, 120 bp, Homo sapiens
  misc_feature: 515 for SV(C|O) and mtDNA
ttttctgctagggggtggaagcggatgagtaagaagattcctgctacaactatagtgcttgagtggagtagggctgagactggggtggggccttctatggctgaggggagtcaggggtgg

SEQ ID NO: 80199 - DNA, 120 bp, Homo sapiens
  misc_feature: 515 for SV(C|O) and mtDNA
ttcagggtgaccgaaaaatcagaataggtgttggtatagaatggggtctcctcctccggcggggtcgaagaaggtggtgttgaggttgcggtctgttagtagtatagtgatgccagcagc

SEQ ID NO: 80200 - DNA, 120 bp, Homo sapiens
  misc_feature: 515 for SV(C|O) and mtDNA
ttaggggaactagtcagttgccaaagcctccgattatgatgggtattactatgaagaagattattacaaatgcatgggctgtgacgataacgttgtagatgtggtcgttacctagaaggt

SEQ ID NO: 80201 - DNA, 120 bp, Homo sapiens
  misc_feature: 515 for SV(C|O) and mtDNA
gctatactaaccccagggttggtcaatttcgtgccagccaccgcggtcacacgattaacccaagtcaatagaagccggcgtaaagagtgttttagatcaccccctccccaataaagctaa

SEQ ID NO: 80202 - DNA, 120 bp, Homo sapiens; identical to SEQ ID NO: 62317
  misc_feature: 515 for SV(C|O) and mtDNA

SEQ ID NO: 80203 - DNA, 120 bp, Homo sapiens
  misc_feature: 515 for SV(C|O) and mtDNA
tccacaaccttaacaatgaacaagatatccgaaaaataggaggactactcaaaaccatacctctcacttcaacctccctcaccattggcagcctagcattagcaggaatacctttcctca

SEQ ID NO: 80204 - DNA, 120 bp, Homo sapiens
  misc_feature: 515 for SV(C|O) and mtDNA
atgacatcaaaaaaatcgtagccttctccacttcaagtcaactaggactcataatagttacaatcggcatcaaccaaccacacctagcattcctgcacatctgtacccacgccttcttca

SEQ ID NO: 80205 - DNA, 120 bp, Homo sapiens; identical to SEQ ID NO: 62563
  misc_feature: 515 for SV(C|O) and mtDNA

SEQ ID NO: 80206 - DNA, 120 bp, Homo sapiens
  misc_feature: 515 for SV(C|O) and mtDNA
aggttaatcactgctgtttcccgtgggggtgtggctaggctaagcgttttgagctgcattgctgcgtgcttgatgcttgtcccttttgatcgtggtgatttagagggtgaactcactgga

SEQ ID NO: 80207 - DNA, 120 bp, Homo sapiens
  misc_feature: 515 for SV(C|O) and mtDNA
tcaacctgttcctgctccggcctccactatagcagatgcgagcaggagtaggagagagggaggtaagagtcagaagcttatgttgtttatgcggggaaacgccatatcgggggcaccgat

SEQ ID NO: 80208 - DNA, 120 bp, Homo sapiens
  misc_feature: 515 for SV(C|O) and mtDNA
tatggctttgaagaaggcgtgggtacagatgtgcaggaatgctaggtgtggttggttgatgccgattgtaactattatgagtcctagttgacttgaagtggagaaggctacgattttttt

SEQ ID NO: 80209 - DNA, 120 bp, Homo sapiens
  misc_feature: 515 for SV(C|O) and mtDNA
gctcttagtaagattacacatgcaagcatccccgttccagtgagttcaccctctaaatcaccacgatcaaaagggacaagcatcaagcacgcagcaatgcagctcaaaacgcttagccta

SEQ ID NO: 80210 - DNA, 120 bp, Homo sapiens
  misc_feature: 515 for SV(C|O) and mtDNA
gagtgttttagatcaccccctccccaataaagctaaaactcacctgagttgtaaaaaactccagctgacacaaaatagactacgaaagtggctttaacatatctgaacacacaatagcta

SEQ ID NO: 80211 - DNA, 120 bp, Homo sapiens
  misc_feature: 515 for SV(C|O) and mtDNA
caatggtactgaacctacgagtacaccgactacggcggactaatcttcaactcctacatacttcccccattattcctagaaccaggcgacctgcgactccttgacgttgacaatcgagta

SEQ ID NO: 80212 - DNA, 120 bp, Homo sapiens; identical to SEQ ID NO: 62923
  misc_feature: 515 for SV(C|O) and mtDNA

SEQ ID NO: 80213 - DNA, 120 bp, Homo sapiens
  misc_feature: 515 for SV(C|O) and mtDNA
cctccctgacaagcgcctatagcactcgaataattcttctcaccctaacaggtcaacctcgcttccccacccttactaacattaacgaaaataaccccaccctactaaaccccattaaac

SEQ ID NO: 80214 - DNA, 120 bp, Homo sapiens
  misc_feature: 515 for SV(C|O) and mtDNA
gatcaaacaaccccctaggaatcacctcccattccgataaaatcaccttccacccttactacacaatcaaagacgccctcggcttacttctcttccttctctccttaatgacattaacac

SEQ ID NO: 80215 - DNA, 120 bp, Homo sapiens; identical to SEQ ID NO: 62692
  misc_feature: 515 for SV(C|O) and mtDNA

SEQ ID NO: 80216 - DNA, 120 bp, Homo sapiens
  misc_feature: 515 for SV(C|O) and mtDNA
ggtttctactccaaagaccacatcatcgaaaccgcaaacatatcatacacaaacgcctgagccctatctattactctcatcgctacctccctgacaagcgcctatagcactcgaataatt

SEQ ID NO: 80217 - DNA, 120 bp, Homo sapiens
  misc_feature: 515 for SV(C|O) and mtDNA
cccaattaggtctccacccctgactcccctcagccatagaaggccccaccccagtctcagccctactccactcaagcactatagttgtagcaggaatcttcttactcatccgcttccacc

SEQ ID NO: 80218 - DNA, 120 bp, Homo sapiens
  misc_feature: 515 for SV(C|O) and mtDNA
cccttacacaaaatgacatcaaaaaaatcgtagccttctccacttcaagtcaactaggactcataatagttacaatcggcatcaaccaaccacacctagcattcctgcacatctgtaccc

SEQ ID NO: 80219 - DNA, 120 bp, Homo sapiens
  misc_feature: 515 for SV(C|O) and mtDNA
ggctttgaagaaggcgtgggtacagatgtgcaggaatgctaggtgtggttggttgatgccgattgtaactattatgagtcctagttgacttgaagtggagaaggctacgatttttttgat

SEQ ID NO: 80220 - DNA, 120 bp, Homo sapiens
  misc_feature: 515 for SV(C|O) and mtDNA
cttagtaagattacacatgcaagcatccccgttccagtgagttcaccctctaaatcaccacgatcaaaagggacaagcatcaagcacgcagcaatgcagctcaaaacgcttagcctagcc

SEQ ID NO: 80221 - DNA, 120 bp, Homo sapiens
  misc_feature: 515 for SV(C|O) and mtDNA
ggccttggtatgtgctttctcgtgttacatcgcgccatcattggtatatggttagtgtgttggttagtaggcctagtatgaggagcgttatggagtggaagtgaaatcacatggctaggc

SEQ ID NO: 80222 - DNA, 120 bp, Homo sapiens; identical to SEQ ID NO: 59266
  misc_feature: 515 for SV(C|O) and mtDNA

SEQ ID NO: 80223 - DNA, 120 bp, Homo sapiens
  misc_feature: 515 for SV(C|O) and mtDNA
gcaataaacgaaagtttaactaagctatactaaccccagggttggtcaatttcgtgccagccaccgcggtcacacgattaacccaagtcaatagaagccggcgtaaagagtgttttagat

SEQ ID NO: 80224 - DNA, 120 bp, Homo sapiens
  misc_feature: 515 for SV(C|O) and mtDNA
gagcacataaatagtatggctttgaagaaggcgtgggtacagatgtgcaggaatgctaggtgtggttggttgatgccgattgtaactattatgagtcctagttgacttgaagtggagaag

SEQ ID NO: 80225 - DNA, 120 bp, Homo sapiens
  misc_feature: 515 for SV(C|O) and mtDNA
ataatgtttgtgtattcggctatgaagaataaggcgaaggggcctgcggcgtattcgatgttgaagcctgagactagttcggactctccttcggcaaggtcgaagggggttcggttggtc

SEQ ID NO: 80226 - DNA, 120 bp, Homo sapiens
  misc_feature: 515 for SV(C|O) and mtDNA
cgcctaagcatagtgttagagtttggattagtgggctattttctgctagggggtggaagcggatgagtaagaagattcctgctacaactatagtgcttgagtggagtagggctgagactg

SEQ ID NO: 80227 - DNA, 120 bp, Homo sapiens
  misc_feature: 515 for SV(C|O) and mtDNA
attaggggaactagtcagttgccaaagcctccgattatgatgggtattactatgaagaagattattacaaatgcatgggctgtgacgataacgttgtagatgtggtcgttacctagaagg

SEQ ID NO: 80228 - DNA, 120 bp, Homo sapiens
  misc_feature: 515 for SV(C|O) and mtDNA
aaggcgaaggggcctgcggcgtattcgatgttgaagcctgagactagttcggactctccttcggcaaggtcgaagggggttcggttggtctctgctagtgtggagataaatcatattatg

SEQ ID NO: 80229 - DNA, 120 bp, Homo sapiens
  misc_feature: 515 for SV(C|O) and mtDNA
aaaggttaatcactgctgtttcccgtgggggtgtggctaggctaagcgttttgagctgcattgctgcgtgcttgatgcttgtcccttttgatcgtggtgatttagagggtgaactcactg

SEQ ID NO: 80230 - DNA, 120 bp, Homo sapiens; identical to SEQ ID NO: 57186
  misc_feature: 515 for SV(C|O) and mtDNA

SEQ ID NO: 80231 - DNA, 120 bp, Homo sapiens
  misc_feature: 515 for SV(C|O) and mtDNA
atggtactgaacctacgagtacaccgactacggcggactaatcttcaactcctacatacttcccccattattcctagaaccaggcgacctgcgactccttgacgttgacaatcgagtagt

SEQ ID NO: 80232 - DNA, 120 bp, Homo sapiens
  misc_feature: 514 for SV(C|O) and mtDNA
tacgagtacaccgactacggcggactaatcttcaactcctacatacttcccccattattcctagaaccaggcgacctgcgactccttgacgttgacaatcgagtagtactcccgattgaa

SEQ ID NO: 80233 - DNA, 120 bp, Homo sapiens
  misc_feature: 514 for SV(C|O) and mtDNA
cagccaccgcggtcacacgattaacccaagtcaatagaagccggcgtaaagagtgttttagatcaccccctccccaataaagctaaaactcacctgagttgtaaaaaactccagctgaca

SEQ ID NO: 80234 - DNA, 120 bp, Homo sapiens; identical to SEQ ID NO: 62249
  misc_feature: 514 for SV(C|O) and mtDNA

SEQ ID NO: 80235 - DNA, 120 bp, Homo sapiens
  misc_feature: 514 for SV(C|O) and mtDNA
tgagaaccaaaatgaacgaaaatctgttcgcttcattcattgcccccacaatcctaggcctacccgccgcagtactgatcattctatttccccctctattgatccccacctccaaatatc

SEQ ID NO: 80236 - DNA, 120 bp, Homo sapiens
  misc_feature: 514 for SV(C|O) and mtDNA
atatcattctgaggggccacagtaattacaaacttactatccgccatcccatacattgggacagacctagttcaatgaatctgaggaggctactcagtagacagtcccaccctcacacga

SEQ ID NO: 80237 - DNA, 120 bp, Homo sapiens
  misc_feature: 514 for SV(C|O) and mtDNA
aagttacaatatgggagattattccgaagcctggtaggataagaatataaacttcagggtgaccgaaaaatcagaataggtgttggtatagaatggggtctcctcctccggcggggtcga

SEQ ID NO: 80238 - DNA, 120 bp, Homo sapiens
  misc_feature: 514 for SV(C|O) and mtDNA
tcctccaaatcaccacaggactattcctagccatgcactactcaccagacgcctcaaccgccttttcatcaatcgcccacatcactcgagacgtaaattatggctgaatcatccgctacc

SEQ ID NO: 80239 - DNA, 120 bp, Homo sapiens; identical to SEQ ID NO: 61221
  misc_feature: 514 for SV(C|O) and mtDNA

SEQ ID NO: 80240 - DNA, 120 bp, Homo sapiens
  misc_feature: 514 for SV(C|O) and mtDNA
cttgtgatgtaattattatacgaatgggggcttcaatcgggagtactactcgattgtcaacgtcaaggagtcgcaggtcgcctggttctaggaataatgggggaagtatgtaggagttga

SEQ ID NO: 80241 - DNA, 120 bp, Homo sapiens
  misc_feature: 514 for SV(C|O) and mtDNA
cctgagaaccaaaatgaacgaaaatctgttcgcttcattcattgcccccacaatcctaggcctacccgccgcagtactgatcattctatttccccctctattgatccccacctccaaata

SEQ ID NO: 80242 - DNA, 120 bp, Homo sapiens
  misc_feature: 514 for SV(C|O) and mtDNA
attactctcatcgctacctccctgacaagcgcctatagcactcgaataattcttctcaccctaacaggtcaacctcgcttccccacccttactaacattaacgaaaataaccccacccta

SEQ ID NO: 80243 - DNA, 120 bp, Homo sapiens
  misc_feature: 514 for SV(C|O) and mtDNA
gatcctccaaatcaccacaggactattcctagccatgcactactcaccagacgcctcaaccgccttttcatcaatcgcccacatcactcgagacgtaaattatggctgaatcatccgcta

SEQ ID NO: 80244 - DNA, 120 bp, Homo sapiens
  misc_feature: 514 for SV(C|O) and mtDNA
tagcgctgtgatgagtgtgcctgcaaagatggtagagtagatgacgggttgggccaggggattaattagtacgggaagggtataaccaacattttcggggtatgggcccgatagcttatt

SEQ ID NO: 80245 - DNA, 120 bp, Homo sapiens
  misc_feature: 514 for SV(C|O) and mtDNA
tactctcatcgctacctccctgacaagcgcctatagcactcgaataattcttctcaccctaacaggtcaacctcgcttccccacccttactaacattaacgaaaataaccccaccctact

SEQ ID NO: 80246 - DNA, 120 bp, Homo sapiens
  misc_feature: 514 for SV(C|O) and mtDNA
taacctctccacccttatcacaacacaagaacacctctgattactcctgccatcatgacccttggccataatatgatttatctccacactagcagagaccaaccgaacccccttcgacct

SEQ ID NO: 80247 - DNA, 120 bp, Homo sapiens
  misc_feature: 514 for SV(C|O) and mtDNA
gcccaattaggtctccacccctgactcccctcagccatagaaggccccaccccagtctcagccctactccactcaagcactatagttgtagcaggaatcttcttactcatccgcttccac

SEQ ID NO: 80248 - DNA, 120 bp, Homo sapiens
  misc_feature: 514 for SV(C|O) and mtDNA
gtcctaatcacagcagtcctacttctcctatctctcccagtcctagctgctggcatcactatactactaacagaccgcaacctcaacaccaccttcttcgaccccgccggaggaggagac

SEQ ID NO: 80249 - DNA, 120 bp, Homo sapiens
  misc_feature: 514 for SV(C|O) and mtDNA
cataaatagtatggctttgaagaaggcgtgggtacagatgtgcaggaatgctaggtgtggttggttgatgccgattgtaactattatgagtcctagttgacttgaagtggagaaggctac

SEQ ID NO: 80250 - DNA, 120 bp, Homo sapiens; identical to SEQ ID NO: 59666
  misc_feature: 514 for SV(C|O) and mtDNA

SEQ ID NO: 80251 - DNA, 120 bp, Homo sapiens
  misc_feature: 514 for SV(C|O) and mtDNA
ggcttccggctgtcaggcgtttaatggggtttagtagggtggggttattttcgttaatgttagtaagggtggggaagcgaggttgacctgttagggtgagaagaattattcgagtgctat

SEQ ID NO: 80252 - DNA, 120 bp, Homo sapiens
  misc_feature: 514 for SV(C|O) and mtDNA
ggccaaatatcattctgaggggccacagtaattacaaacttactatccgccatcccatacattgggacagacctagttcaatgaatctgaggaggctactcagtagacagtcccaccctc

SEQ ID NO: 80253 - DNA, 120 bp, Homo sapiens
  misc_feature: 514 for SV(C|O) and mtDNA
ggcagttgaggtggattaaaccaaacccagctacgcaaaatcttagcatactcctcaattacccacataggatgaataatagcagttctaccgtacaaccctaacataaccattcttaat

SEQ ID NO: 80254 - DNA, 120 bp, Homo sapiens
  misc_feature: 514 for SV(C|O) and mtDNA
ggagagctcccgtgagtggttaatagggtgatagacctgtgatccatcgtgatgtcttatttaaggggaacgtgtgggctatttaggctttatggccctgaagtaggaaccagatgtcgg

SEQ ID NO: 80255 - DNA, 120 bp, Homo sapiens
  misc_feature: 514 for SV(C|O) and mtDNA
aagagtgttttagatcaccccctccccaataaagctaaaactcacctgagttgtaaaaaactccagctgacacaaaatagactacgaaagtggctttaacatatctgaacacacaatagc

SEQ ID NO: 80256 - DNA, 120 bp, Homo sapiens
  misc_feature: 514 for SV(C|O) and mtDNA
gcggcgtattcgatgttgaagcctgagactagttcggactctccttcggcaaggtcgaagggggttcggttggtctctgctagtgtggagataaatcatattatggccaagggtcatgat

SEQ ID NO: 80257 - DNA, 120 bp, Homo sapiens
  misc_feature: 514 for SV(C|O) and mtDNA
gcccccgctaaccggctttttgcccaaatgggccattatcgaagaattcacaaaaaacaatagcctcatcatccccaccatcatagccaccatcaccctccttaacctctacttctacct

SEQ ID NO: 80258 - DNA, 120 bp, Homo sapiens
  misc_feature: 514 for SV(C|O) and mtDNA
attaaacacaaactaccacctacctccctcaccaaagcccataaaaataaaaaattataacaaaccctgagaaccaaaatgaacgaaaatctgttcgcttcattcattgcccccacaatc

SEQ ID NO: 80259 - DNA, 120 bp, Homo sapiens
  misc_feature: 514 for SV(C|O) and mtDNA
ctccttaacctctacttctacctacgcctaatctactccacctcaatcacactactccccatatctaacaacgtaaaaataaaatgacagtttgaacatacaaaacccaccccattcctc

SEQ ID NO: 80260 - DNA, 120 bp, Homo sapiens
  misc_feature: 514 for SV(C|O) and mtDNA
gagcaaaccacagtttcatgcccatcgtcctagaattaattcccctaaaaatctttgaaatagggcccgtatttaccctatagcaccccctctaccccctctagagcccactgtaaagct

SEQ ID NO: 80261 - DNA, 120 bp, Homo sapiens; identical to SEQ ID NO: 57524
  misc_feature: 514 for SV(C|O) and mtDNA

SEQ ID NO: 80262 - DNA, 120 bp, Homo sapiens
  misc_feature: 514 for SV(C|O) and mtDNA
ctcagccctactccactcaagcactatagttgtagcaggaatcttcttactcatccgcttccaccccctagcagaaaatagcccactaatccaaactctaacactatgcttaggcgctat

SEQ ID NO: 80263 - DNA, 120 bp, Homo sapiens
  misc_feature: 514 for SV(C|O) and mtDNA
cgctacctccctgacaagcgcctatagcactcgaataattcttctcaccctaacaggtcaacctcgcttccccacccttactaacattaacgaaaataaccccaccctactaaaccccat

SEQ ID NO: 80264 - DNA, 120 bp, Homo sapiens
  misc_feature: 514 for SV(C|O) and mtDNA
cgccattggcgtgaaggtagcggatgattcagccataatttacgtctcgagtgatgtgggcgattgatgaaaaggcggttgaggcgtctggtgagtagtgcatggctaggaatagtcctg

SEQ ID NO: 80265 - DNA, 120 bp, Homo sapiens; identical to SEQ ID NO: 59127
  misc_feature: 514 for SV(C|O) and mtDNA

SEQ ID NO: 80266 - DNA, 120 bp, Homo sapiens; identical to SEQ ID NO: 56929
  misc_feature: 514 for SV(C|O) and mtDNA

SEQ ID NO: 80267 - DNA, 120 bp, Homo sapiens
  misc_feature: 514 for SV(C|O) and mtDNA
aaggttaatcactgctgtttcccgtgggggtgtggctaggctaagcgttttgagctgcattgctgcgtgcttgatgcttgtcccttttgatcgtggtgatttagagggtgaactcactgg

SEQ ID NO: 80268 - DNA, 120 bp, Homo sapiens
  misc_feature: 514 for SV(C|O) and mtDNA
aagccatactatttatgtgctccgggtccatcatccacaaccttaacaatgaacaagatatccgaaaaataggaggactactcaaaaccatacctctcacttcaacctccctcaccattg

SEQ ID NO: 80269 - DNA, 120 bp, Homo sapiens; identical to SEQ ID NO: 58760
  misc_feature: 514 for SV(C|O) and mtDNA

SEQ ID NO: 80270 - DNA, 120 bp, Homo sapiens; identical to SEQ ID NO: 62624
  misc_feature: 514 for SV(C|O) and mtDNA

SEQ ID NO: 80271 - DNA, 120 bp, Homo sapiens
  misc_feature: 514 for SV(C|O) and mtDNA
acacctagcattcctgcacatctgtacccacgccttcttcaaagccatactatttatgtgctccgggtccatcatccacaaccttaacaatgaacaagatatccgaaaaataggaggact

SEQ ID NO: 80272 - DNA, 120 bp, Homo sapiens; identical to SEQ ID NO: 58436
  misc_feature: 514 for SV(C|O) and mtDNA

SEQ ID NO: 80273 - DNA, 120 bp, Homo sapiens
  misc_feature: 513 for SV(C|O) and mtDNA
tttctactccaaagaccacatcatcgaaaccgcaaacatatcatacacaaacgcctgagccctatctattactctcatcgctacctccctgacaagcgcctatagcactcgaataattct

SEQ ID NO: 80274 - DNA, 120 bp, Homo sapiens
  misc_feature: 513 for SV(C|O) and mtDNA
actaagctatactaaccccagggttggtcaatttcgtgccagccaccgcggtcacacgattaacccaagtcaatagaagccggcgtaaagagtgttttagatcaccccctccccaataaa

SEQ ID NO: 80275 - DNA, 120 bp, Homo sapiens
  misc_feature: 513 for SV(C|O) and mtDNA
acctccctgacaagcgcctatagcactcgaataattcttctcaccctaacaggtcaacctcgcttccccacccttactaacattaacgaaaataaccccaccctactaaaccccattaaa

SEQ ID NO: 80276 - DNA, 120 bp, Homo sapiens
  misc_feature: 513 for SV(C|O) and mtDNA
ttgctaaaggttaatcactgctgtttcccgtgggggtgtggctaggctaagcgttttgagctgcattgctgcgtgcttgatgcttgtcccttttgatcgtggtgatttagagggtgaact

SEQ ID NO: 80277 - DNA, 120 bp, Homo sapiens
  misc_feature: 513 for SV(C|O) and mtDNA
agttacaatatgggagattattccgaagcctggtaggataagaatataaacttcagggtgaccgaaaaatcagaataggtgttggtatagaatggggtctcctcctccggcggggtcgaa

SEQ ID NO: 80278 - DNA, 120 bp, Homo sapiens
  misc_feature: 513 for SV(C|O) and mtDNA
ggtgacaaaatatgttgtgtagagttcaggggagagtgcgtcatatgttgttcctaggaagattgtagtggtgagggtgtttattataataatgtttgtgtattcggctatgaagaataa

SEQ ID NO: 80279 - DNA, 120 bp, Homo sapiens
  misc_feature: 513 for SV(C|O) and mtDNA
caggtttctactccaaagaccacatcatcgaaaccgcaaacatatcatacacaaacgcctgagccctatctattactctcatcgctacctccctgacaagcgcctatagcactcgaataa

SEQ ID NO: 80280 - DNA, 120 bp, Homo sapiens
  misc_feature: 513 for SV(C|O) and mtDNA
tgtgctttctcgtgttacatcgcgccatcattggtatatggttagtgtgttggttagtaggcctagtatgaggagcgttatggagtggaagtgaaatcacatggctaggccggaggtcat

SEQ ID NO: 80281 - DNA, 120 bp, Homo sapiens
  misc_feature: 513 for SV(C|O) and mtDNA
ccccatgcctcaggatactcctcaatagccatcgctgtagtatatccaaagacaaccatcattccccctaaataaattaaaaaaactattaaacccatataacctcccccaaaattcaga

SEQ ID NO: 80282 - DNA, 120 bp, Homo sapiens; identical to SEQ ID NO: 58619
  misc_feature: 513 for SV(C|O) and mtDNA

SEQ ID NO: 80283 - DNA, 120 bp, Homo sapiens; identical to SEQ ID NO: 57543
  misc_feature: 513 for SV(C|O) and mtDNA

SEQ ID NO: 80284 - DNA, 120 bp, Homo sapiens
  misc_feature: 513 for SV(C|O) and mtDNA
ataccaacacctattctgatttttcggtcaccctgaagtttatattcttatcctaccaggcttcggaataatctcccatattgtaacttactactccggaaaaaaagaaccatttggata

SEQ ID NO: 80285 - DNA, 120 bp, Homo sapiens; identical to SEQ ID NO: 59068
  misc_feature: 513 for SV(C|O) and mtDNA

SEQ ID NO: 80286 - DNA, 120 bp, Homo sapiens
  misc_feature: 513 for SV(C|O) and mtDNA
gtgctttctcgtgttacatcgcgccatcattggtatatggttagtgtgttggttagtaggcctagtatgaggagcgttatggagtggaagtgaaatcacatggctaggccggaggtcatt

SEQ ID NO: 80287 - DNA, 120 bp, Homo sapiens
  misc_feature: 513 for SV(C|O) and mtDNA
gtgacaaaatatgttgtgtagagttcaggggagagtgcgtcatatgttgttcctaggaagattgtagtggtgagggtgtttattataataatgtttgtgtattcggctatgaagaataag

SEQ ID NO: 80288 - DNA, 120 bp, Homo sapiens
  misc_feature: 513 for SV(C|O) and mtDNA
gtactgaacctacgagtacaccgactacggcggactaatcttcaactcctacatacttcccccattattcctagaaccaggcgacctgcgactccttgacgttgacaatcgagtagtact

SEQ ID NO: 80289 - DNA, 120 bp, Homo sapiens
  misc_feature: 513 for SV(C|O) and mtDNA
ggtcagctaaataagctatcgggcccataccccgaaaatgttggttatacccttcccgtactaattaatcccctggcccaacccgtcatctactctaccatctttgcaggcacactcatc

SEQ ID NO: 80290 - DNA, 120 bp, Homo sapiens
  misc_feature: 513 for SV(C|O) and mtDNA
gggcctgcggcgtattcgatgttgaagcctgagactagttcggactctccttcggcaaggtcgaagggggttcggttggtctctgctagtgtggagataaatcatattatggccaagggt

SEQ ID NO: 80291 - DNA, 120 bp, Homo sapiens
  misc_feature: 513 for SV(C|O) and mtDNA
gcatttcactgtaaagaggtgttggttctcttaatctttaacttaaaaggttaatgctaagttagctttacagtgggctctagagggggtagagggggtgctatagggtaaatacgggcc

SEQ ID NO: 80292 - DNA, 120 bp, Homo sapiens
  misc_feature: 513 for SV(C|O) and mtDNA
aacttcagggtgaccgaaaaatcagaataggtgttggtatagaatggggtctcctcctccggcggggtcgaagaaggtggtgttgaggttgcggtctgttagtagtatagtgatgccagc

SEQ ID NO: 80293 - DNA, 120 bp, Homo sapiens; identical to SEQ ID NO: 62996
  misc_feature: 513 for SV(C|O) and mtDNA

SEQ ID NO: 80294 - DNA, 120 bp, Homo sapiens; identical to SEQ ID NO: 58744
  misc_feature: 513 for SV(C|O) and mtDNA

SEQ ID NO: 80295 - DNA, 120 bp, Homo sapiens; identical to SEQ ID NO: 59310
  misc_feature: 513 for SV(C|O) and mtDNA

SEQ ID NO: 80296 - DNA, 120 bp, Homo sapiens
  misc_feature: 513 for SV(C|O) and mtDNA
caataaacgaaagtttaactaagctatactaaccccagggttggtcaatttcgtgccagccaccgcggtcacacgattaacccaagtcaatagaagccggcgtaaagagtgttttagatc

SEQ ID NO: 80297 - DNA, 120 bp, Homo sapiens
  misc_feature: 513 for SV(C|O) and mtDNA
gaattttgggggaggttatatgggtttaatagtttttttaatttatttagggggaatgatggttgtctttggatatactacagcgatggctattgaggagtatcctgaggcatgggggtc

SEQ ID NO: 80298 - DNA, 120 bp, Homo sapiens
  misc_feature: 513 for SV(C|O) and mtDNA
cctttaacctctccacccttatcacaacacaagaacacctctgattactcctgccatcatgacccttggccataatatgatttatctccacactagcagagaccaaccgaacccccttcg

SEQ ID NO: 80299 - DNA, 120 bp, Homo sapiens
  misc_feature: 513 for SV(C|O) and mtDNA
cctagacctaacctgactagaaaagctattacctaaaacaatttcacagcaccaaatctccacctccatcatcacctcaacccaaaaaggcataattaaactttacttcctctctttctt

SEQ ID NO: 80300 - DNA, 120 bp, Homo sapiens
  misc_feature: 513 for SV(C|O) and mtDNA
cctaagcatagtgttagagtttggattagtgggctattttctgctagggggtggaagcggatgagtaagaagattcctgctacaactatagtgcttgagtggagtagggctgagactggg

SEQ ID NO: 80301 - DNA, 120 bp, Homo sapiens
  misc_feature: 513 for SV(C|O) and mtDNA
ccctgagaaccaaaatgaacgaaaatctgttcgcttcattcattgcccccacaatcctaggcctacccgccgcagtactgatcattctatttccccctctattgatccccacctccaaat

SEQ ID NO: 80302 - DNA, 120 bp, Homo sapiens; identical to SEQ ID NO: 58401
  misc_feature: 513 for SV(C|O) and mtDNA

SEQ ID NO: 80303 - DNA, 120 bp, Homo sapiens
  misc_feature: 513 for SV(C|O) and mtDNA
agttttttcataggaggtgtatgagttggtcgtagcggaatcgggggtatgctgttcgaattcataagaacagggaggttagaagtagggtcttggtgacaaaatatgttgtgtagagtt

SEQ ID NO: 80304 - DNA, 120 bp, Homo sapiens
  misc_feature: 513 for SV(C|O) and mtDNA
agagtgttttagatcaccccctccccaataaagctaaaactcacctgagttgtaaaaaactccagctgacacaaaatagactacgaaagtggctttaacatatctgaacacacaatagct

SEQ ID NO: 80305 - DNA, 120 bp, Homo sapiens
  misc_feature: 513 for SV(C|O) and mtDNA
agcaggcagttgaggtggattaaaccaaacccagctacgcaaaatcttagcatactcctcaattacccacataggatgaataatagcagttctaccgtacaaccctaacataaccattct

SEQ ID NO: 80306 - DNA, 120 bp, Homo sapiens
  misc_feature: 512 for SV(C|O) and mtDNA
ttcaaactctactcccactaatagctttttgatgacttctagcaagcctcgctaacctcgccttaccccccactattaacctactgggagaactctctgtgctagtaaccacgttctcct

SEQ ID NO: 80307 - DNA, 120 bp, Homo sapiens
  misc_feature: 512 for SV(C|O) and mtDNA
tggctcgtaagaaggcctagataggggattgtgcggtgtgtgatggtagggtagaatccgagtatgttggagaaataaaatgtgcatagtggggattttattttaagtttgttggttagg

SEQ ID NO: 80308 - DNA, 120 bp, Homo sapiens
  misc_feature: 512 for SV(C|O) and mtDNA
tgcggcgtattcgatgttgaagcctgagactagttcggactctccttcggcaaggtcgaagggggttcggttggtctctgctagtgtggagataaatcatattatggccaagggtcatga

SEQ ID NO: 80309 - DNA, 120 bp, Homo sapiens
  misc_feature: 512 for SV(C|O) and mtDNA
aataaacgaaagtttaactaagctatactaaccccagggttggtcaatttcgtgccagccaccgcggtcacacgattaacccaagtcaatagaagccggcgtaaagagtgttttagatca

SEQ ID NO: 80310 - DNA, 120 bp, Homo sapiens
  misc_feature: 512 for SV(C|O) and mtDNA
atgtgctttctcgtgttacatcgcgccatcattggtatatggttagtgtgttggttagtaggcctagtatgaggagcgttatggagtggaagtgaaatcacatggctaggccggaggtca

SEQ ID NO: 80311 - DNA, 120 bp, Homo sapiens
  misc_feature: 512 for SV(C|O) and mtDNA
aattttgggggaggttatatgggtttaatagtttttttaatttatttagggggaatgatggttgtctttggatatactacagcgatggctattgaggagtatcctgaggcatgggggtca

SEQ ID NO: 80312 - DNA, 120 bp, Homo sapiens
  misc_feature: 512 for SV(C|O) and mtDNA
taaatagtatggctttgaagaaggcgtgggtacagatgtgcaggaatgctaggtgtggttggttgatgccgattgtaactattatgagtcctagttgacttgaagtggagaaggctacga

SEQ ID NO: 80313 - DNA, 120 bp, Homo sapiens; identical to SEQ ID NO: 61416
  misc_feature: 512 for SV(C|O) and mtDNA

SEQ ID NO: 80314 - DNA, 120 bp, Homo sapiens
  misc_feature: 512 for SV(C|O) and mtDNA
aaataccaaatgcatggagagctcccgtgagtggttaatagggtgatagacctgtgatccatcgtgatgtcttatttaaggggaacgtgtgggctatttaggctttatggccctgaagta

SEQ ID NO: 80315 - DNA, 120 bp, Homo sapiens
  misc_feature: 512 for SV(C|O) and mtDNA
atacccccggtcgtgtagcggtgaaagtggtttggtttagacgtccgggaattgcatctgtttttaagcctaatgtggggacagctcatgagtgcaagacgtcttgtgatgtaattatta

SEQ ID NO: 80316 - DNA, 120 bp, Homo sapiens
  misc_feature: 512 for SV(C|O) and mtDNA
acccccctccccatacccaaccccctggtcaacctcaacctaggcctcctatttattctagccacctctagcctagccgtttactcaatcctctgatcagggtgagcatcaaactcaaac

SEQ ID NO: 80317 - DNA, 120 bp, Homo sapiens; identical to SEQ ID NO: 61676
  misc_feature: 512 for SV(C|O) and mtDNA

SEQ ID NO: 80318 - DNA, 120 bp, Homo sapiens
  misc_feature: 512 for SV(C|O) and mtDNA
gtgaaggtagcggatgattcagccataatttacgtctcgagtgatgtgggcgattgatgaaaaggcggttgaggcgtctggtgagtagtgcatggctaggaatagtcctgtggtgatttg

SEQ ID NO: 80319 - DNA, 120 bp, Homo sapiens
  misc_feature: 512 for SV(C|O) and mtDNA
ggtttgttaggtactgtttgcattaataaattaaagctccatagggtcttctcgtcttgctgtgtcatgcccgcctcttcacgggcaggtcaatttcactggttaaaagtaagagacagc

SEQ ID NO: 80320 - DNA, 120 bp, Homo sapiens
  misc_feature: 512 for SV(C|O) and mtDNA
ggtaaatatgtagagggagtatagggctgtgactagtatgttgagtcctgtaagtaggagagtgatatttgatcaggagaacgtggttactagcacagagagttctcccagtaggttaat

SEQ ID NO: 80321 - DNA, 120 bp, Homo sapiens
  misc_feature: 512 for SV(C|O) and mtDNA
gggtagactgttcaacctgttcctgctccggcctccactatagcagatgcgagcaggagtaggagagagggaggtaagagtcagaagcttatgttgtttatgcggggaaacgccatatcg

SEQ ID NO: 80322 - DNA, 120 bp, Homo sapiens
  misc_feature: 512 for SV(C|O) and mtDNA
ggcgtgaaggtagcggatgattcagccataatttacgtctcgagtgatgtgggcgattgatgaaaaggcggttgaggcgtctggtgagtagtgcatggctaggaatagtcctgtggtgat

SEQ ID NO: 80323 - DNA, 120 bp, Homo sapiens
  misc_feature: 512 for SV(C|O) and mtDNA
gcgggagaagccccggcaggtttgaagctgcttcttcgaatttgcaattcaatatgaaaatcacctcggagctggtaaaaagaggcctaacccctgtctttagatttacagtccaatgct

SEQ ID NO: 80324 - DNA, 120 bp, Homo sapiens; identical to SEQ ID NO: 57578
  misc_feature: 512 for SV(C|O) and mtDNA

SEQ ID NO: 80325 - DNA, 120 bp, Homo sapiens
  misc_feature: 512 for SV(C|O) and mtDNA
caaaatgacatcaaaaaaatcgtagccttctccacttcaagtcaactaggactcataatagttacaatcggcatcaaccaaccacacctagcattcctgcacatctgtacccacgccttc

SEQ ID NO: 80326 - DNA, 120 bp, Homo sapiens
  misc_feature: 512 for SV(C|O) and mtDNA
attttgggggaggttatatgggtttaatagtttttttaatttatttagggggaatgatggttgtctttggatatactacagcgatggctattgaggagtatcctgaggcatgggggtcag

SEQ ID NO: 80327 - DNA, 120 bp, Homo sapiens
  misc_feature: 512 for SV(C|O) and mtDNA
ctcttagtaagattacacatgcaagcatccccgttccagtgagttcaccctctaaatcaccacgatcaaaagggacaagcatcaagcacgcagcaatgcagctcaaaacgcttagcctag

SEQ ID NO: 80328 - DNA, 120 bp, Homo sapiens; identical to SEQ ID NO: 54017
  misc_feature: 512 for SV(C|O) and mtDNA

SEQ ID NO: 80329 - DNA, 120 bp, Homo sapiens; identical to SEQ ID NO: 60887
  misc_feature: 512 for SV(C|O) and mtDNA

SEQ ID NO: 80330 - DNA, 120 bp, Homo sapiens; identical to SEQ ID NO: 57528
  misc_feature: 512 for SV(C|O) and mtDNA

SEQ ID NO: 80331 - DNA, 120 bp, Homo sapiens
  misc_feature: 512 for SV(C|O) and mtDNA
cctattctgatttttcggtcaccctgaagtttatattcttatcctaccaggcttcggaataatctcccatattgtaacttactactccggaaaaaaagaaccatttggatacataggtat

SEQ ID NO: 80332 - DNA, 120 bp, Homo sapiens
  misc_feature: 512 for SV(C|O) and mtDNA
catcatccacaaccttaacaatgaacaagatatccgaaaaataggaggactactcaaaaccatacctctcacttcaacctccctcaccattggcagcctagcattagcaggaataccttt

SEQ ID NO: 80333 - DNA, 120 bp, Homo sapiens
  misc_feature: 512 for SV(C|O) and mtDNA
cacataaatagtatggctttgaagaaggcgtgggtacagatgtgcaggaatgctaggtgtggttggttgatgccgattgtaactattatgagtcctagttgacttgaagtggagaaggct

SEQ ID NO: 80334 - DNA, 120 bp, Homo sapiens
  misc_feature: 512 for SV(C|O) and mtDNA
atcattctgaggggccacagtaattacaaacttactatccgccatcccatacattgggacagacctagttcaatgaatctgaggaggctactcagtagacagtcccaccctcacacgatt

SEQ ID NO: 80335 - DNA, 120 bp, Homo sapiens; identical to SEQ ID NO: 62256
  misc_feature: 512 for SV(C|O) and mtDNA

SEQ ID NO: 80336 - DNA, 120 bp, Homo sapiens; identical to SEQ ID NO: 61033
  misc_feature: 512 for SV(C|O) and mtDNA

SEQ ID NO: 80337 - DNA, 120 bp, Homo sapiens
  misc_feature: 512 for SV(C|O) and mtDNA
acaaaatgacatcaaaaaaatcgtagccttctccacttcaagtcaactaggactcataatagttacaatcggcatcaaccaaccacacctagcattcctgcacatctgtacccacgcctt

SEQ ID NO: 80338 - DNA, 120 bp, Homo sapiens
  misc_feature: 512 for SV(C|O) and mtDNA
aacctctccacccttatcacaacacaagaacacctctgattactcctgccatcatgacccttggccataatatgatttatctccacactagcagagaccaaccgaacccccttcgacctt

SEQ ID NO: 80339 - DNA, 120 bp, Homo sapiens
  misc_feature: 511 for SV(C|O) and mtDNA
tttcccgtgggggtgtggctaggctaagcgttttgagctgcattgctgcgtgcttgatgcttgtcccttttgatcgtggtgatttagagggtgaactcactggaacggggatgcttgcat

SEQ ID NO: 80340 - DNA, 120 bp, Homo sapiens
  misc_feature: 511 for SV(C|O) and mtDNA
ttctgaggggccacagtaattacaaacttactatccgccatcccatacattgggacagacctagttcaatgaatctgaggaggctactcagtagacagtcccaccctcacacgattcttt

SEQ ID NO: 80341 - DNA, 120 bp, Homo sapiens; identical to SEQ ID NO: 57658
  misc_feature: 511 for SV(C|O) and mtDNA

SEQ ID NO: 80342 - DNA, 120 bp, Homo sapiens
  misc_feature: 511 for SV(C|O) and mtDNA
gttgaggtggattaaaccaaacccagctacgcaaaatcttagcatactcctcaattacccacataggatgaataatagcagttctaccgtacaaccctaacataaccattcttaatttaa

SEQ ID NO: 80343 - DNA, 120 bp, Homo sapiens; identical to SEQ ID NO: 60209
  misc_feature: 511 for SV(C|O) and mtDNA

SEQ ID NO: 80344 - DNA, 120 bp, Homo sapiens
  misc_feature: 511 for SV(C|O) and mtDNA
tggccttggtatgtgctttctcgtgttacatcgcgccatcattggtatatggttagtgtgttggttagtaggcctagtatgaggagcgttatggagtggaagtgaaatcacatggctagg

SEQ ID NO: 80345 - DNA, 120 bp, Homo sapiens
  misc_feature: 511 for SV(C|O) and mtDNA
agcccaattaggtctccacccctgactcccctcagccatagaaggccccaccccagtctcagccctactccactcaagcactatagttgtagcaggaatcttcttactcatccgcttcca

SEQ ID NO: 80346 - DNA, 120 bp, Homo sapiens
  misc_feature: 511 for SV(C|O) and mtDNA
tgctcaccctgatcagaggattgagtaaacggctaggctagaggtggctagaataaataggaggcctaggttgaggttgaccagggggttgggtatggggaggggggttcatagtagaag

SEQ ID NO: 80347 - DNA, 120 bp, Homo sapiens
  misc_feature: 511 for SV(C|O) and mtDNA
cagccctactccactcaagcactatagttgtagcaggaatcttcttactcatccgcttccaccccctagcagaaaatagcccactaatccaaactctaacactatgcttaggcgctatca

SEQ ID NO: 80348 - DNA, 120 bp, Homo sapiens
  misc_feature: 511 for SV(C|O) and mtDNA
tcttagtaagattacacatgcaagcatccccgttccagtgagttcaccctctaaatcaccacgatcaaaagggacaagcatcaagcacgcagcaatgcagctcaaaacgcttagcctagc

SEQ ID NO: 80349 - DNA, 120 bp, Homo sapiens
  misc_feature: 511 for SV(C|O) and mtDNA
tctcagccctactccactcaagcactatagttgtagcaggaatcttcttactcatccgcttccaccccctagcagaaaatagcccactaatccaaactctaacactatgcttaggcgcta

SEQ ID NO: 80350 - DNA, 120 bp, Homo sapiens
  misc_feature: 511 for SV(C|O) and mtDNA
tcaaacaaccccctaggaatcacctcccattccgataaaatcaccttccacccttactacacaatcaaagacgccctcggcttacttctcttccttctctccttaatgacattaacacta

SEQ ID NO: 80351 - DNA, 120 bp, Homo sapiens; identical to SEQ ID NO: 58710
  misc_feature: 511 for SV(C|O) and mtDNA

SEQ ID NO: 80352 - DNA, 120 bp, Homo sapiens
  misc_feature: 511 for SV(C|O) and mtDNA
tattataataatgtttgtgtattcggctatgaagaataaggcgaaggggcctgcggcgtattcgatgttgaagcctgagactagttcggactctccttcggcaaggtcgaagggggttcg

SEQ ID NO: 80353 - DNA, 120 bp, Homo sapiens
  misc_feature: 511 for SV(C|O) and mtDNA
tatgtgctttctcgtgttacatcgcgccatcattggtatatggttagtgtgttggttagtaggcctagtatgaggagcgttatggagtggaagtgaaatcacatggctaggccggaggtc

SEQ ID NO: 80354 - DNA, 120 bp, Homo sapiens; identical to SEQ ID NO: 59195
  misc_feature: 511 for SV(C|O) and mtDNA

SEQ ID NO: 80355 - DNA, 120 bp, Homo sapiens; identical to SEQ ID NO: 56941
  misc_feature: 511 for SV(C|O) and mtDNA

SEQ ID NO: 80356 - DNA, 120 bp, Homo sapiens
  misc_feature: 511 for SV(C|O) and mtDNA
taggggaactagtcagttgccaaagcctccgattatgatgggtattactatgaagaagattattacaaatgcatgggctgtgacgataacgttgtagatgtggtcgttacctagaaggtt

SEQ ID NO: 80357 - DNA, 120 bp, Homo sapiens
  misc_feature: 511 for SV(C|O) and mtDNA
agcaaaccacagtttcatgcccatcgtcctagaattaattcccctaaaaatctttgaaatagggcccgtatttaccctatagcaccccctctaccccctctagagcccactgtaaagcta

SEQ ID NO: 80358 - DNA, 120 bp, Homo sapiens; identical to SEQ ID NO: 57718
  misc_feature: 511 for SV(C|O) and mtDNA

SEQ ID NO: 80359 - DNA, 120 bp, Homo sapiens; identical to SEQ ID NO: 53546
  misc_feature: 511 for SV(C|O) and mtDNA

SEQ ID NO: 80360 - DNA, 120 bp, Homo sapiens
  misc_feature: 511 for SV(C|O) and mtDNA
ctacctccctgacaagcgcctatagcactcgaataattcttctcaccctaacaggtcaacctcgcttccccacccttactaacattaacgaaaataaccccaccctactaaaccccatta

SEQ ID NO: 80361 - DNA, 120 bp, Homo sapiens
  misc_feature: 511 for SV(C|O) and mtDNA
taagctatactaaccccagggttggtcaatttcgtgccagccaccgcggtcacacgattaacccaagtcaatagaagccggcgtaaagagtgttttagatcaccccctccccaataaagc

SEQ ID NO: 80362 - DNA, 120 bp, Homo sapiens
  misc_feature: 511 for SV(C|O) and mtDNA
ctaaaggttaatcactgctgtttcccgtgggggtgtggctaggctaagcgttttgagctgcattgctgcgtgcttgatgcttgtcccttttgatcgtggtgatttagagggtgaactcac

SEQ ID NO: 80363 - DNA, 120 bp, Homo sapiens
  misc_feature: 511 for SV(C|O) and mtDNA
cccccggtcgtgtagcggtgaaagtggtttggtttagacgtccgggaattgcatctgtttttaagcctaatgtggggacagctcatgagtgcaagacgtcttgtgatgtaattattatac

SEQ ID NO: 80364 - DNA, 120 bp, Homo sapiens; identical to SEQ ID NO: 62373
  misc_feature: 511 for SV(C|O) and mtDNA

SEQ ID NO: 80365 - DNA, 120 bp, Homo sapiens
  misc_feature: 511 for SV(C|O) and mtDNA
ggtaaatacgggccctatttcaaagatttttaggggaattaattctaggacgatgggcatgaaactgtggtttgctccacagatttcagagcattgaccgtagtatacccccggtcgtgt

SEQ ID NO: 80366 - DNA, 120 bp, Homo sapiens
  misc_feature: 511 for SV(C|O) and mtDNA
gcgcctaagcatagtgttagagtttggattagtgggctattttctgctagggggtggaagcggatgagtaagaagattcctgctacaactatagtgcttgagtggagtagggctgagact

SEQ ID NO: 80367 - DNA, 120 bp, Homo sapiens; identical to SEQ ID NO: 57876
  misc_feature: 511 for SV(C|O) and mtDNA

SEQ ID NO: 80368 - DNA, 120 bp, Homo sapiens; identical to SEQ ID NO: 58270
  misc_feature: 511 for SV(C|O) and mtDNA

SEQ ID NO: 80369 - DNA, 120 bp, Homo sapiens
  misc_feature: 511 for SV(C|O) and mtDNA
gatcccgtttcgtgcaagaataggaggtggagtgctgctagggctgcaataatgaagggcaagatgaagtgaaaggtaaagaatcgtgtgagggtgggactgtctactgagtagcctcct

SEQ ID NO: 80370 - DNA, 120 bp, Homo sapiens
  misc_feature: 511 for SV(C|O) and mtDNA
acgagtacaccgactacggcggactaatcttcaactcctacatacttcccccattattcctagaaccaggcgacctgcgactccttgacgttgacaatcgagtagtactcccgattgaag

SEQ ID NO: 80371 - DNA, 120 bp, Homo sapiens
  misc_feature: 511 for SV(C|O) and mtDNA
aaagagtgttttagatcaccccctccccaataaagctaaaactcacctgagttgtaaaaaactccagctgacacaaaatagactacgaaagtggctttaacatatctgaacacacaatag

SEQ ID NO: 80372 - DNA, 120 bp, Homo sapiens
  misc_feature: 511 for SV(C|O) and mtDNA
ctactccaaagaccacatcatcgaaaccgcaaacatatcatacacaaacgcctgagccctatctattactctcatcgctacctccctgacaagcgcctatagcactcgaataattcttct

SEQ ID NO: 80373 - DNA, 120 bp, Homo sapiens; identical to SEQ ID NO: 59032
  misc_feature: 511 for SV(C|O) and mtDNA

SEQ ID NO: 80374 - DNA, 120 bp, Homo sapiens; identical to SEQ ID NO: 56995
  misc_feature: 511 for SV(C|O) and mtDNA

SEQ ID NO: 80375 - DNA, 120 bp, Homo sapiens; identical to SEQ ID NO: 59182
  misc_feature: 511 for SV(C|O) and mtDNA

SEQ ID NO: 80376 - DNA, 120 bp, Homo sapiens
  misc_feature: 511 for SV(C|O) and mtDNA
cacaaaatgacatcaaaaaaatcgtagccttctccacttcaagtcaactaggactcataatagttacaatcggcatcaaccaaccacacctagcattcctgcacatctgtacccacgcct

SEQ ID NO: 80377 - DNA, 120 bp, Homo sapiens
  misc_feature: 511 for SV(C|O) and mtDNA
atggctttgaagaaggcgtgggtacagatgtgcaggaatgctaggtgtggttggttgatgccgattgtaactattatgagtcctagttgacttgaagtggagaaggctacgatttttttg

SEQ ID NO: 80378 - DNA, 120 bp, Homo sapiens
  misc_feature: 511 for SV(C|O) and mtDNA
aaacaatctcatatgaagtcaccctagccatcattctactatcaacattactaataagtggctcctttaacctctccacccttatcacaacacaagaacacctctgattactcctgccat

SEQ ID NO: 80379 - DNA, 120 bp, Homo sapiens; identical to SEQ ID NO: 59131
  misc_feature: 511 for SV(C|O) and mtDNA

SEQ ID NO: 80380 - DNA, 120 bp, Homo sapiens
  misc_feature: 511 for SV(C|O) and mtDNA
atcacagcagtcctacttctcctatctctcccagtcctagctgctggcatcactatactactaacagaccgcaacctcaacaccaccttcttcgaccccgccggaggaggagaccccatt

SEQ ID NO: 80381 - DNA, 120 bp, Homo sapiens
  misc_feature: 511 for SV(C|O) and mtDNA
aggtggattaaaccaaacccagctacgcaaaatcttagcatactcctcaattacccacataggatgaataatagcagttctaccgtacaaccctaacataaccattcttaatttaactat

SEQ ID NO: 80382 - DNA, 120 bp, Homo sapiens; identical to SEQ ID NO: 62734
  misc_feature: 511 for SV(C|O) and mtDNA

SEQ ID NO: 80383 - DNA, 120 bp, Homo sapiens
  misc_feature: 511 for SV(C|O) and mtDNA
aaagatttttaggggaattaattctaggacgatgggcatgaaactgtggtttgctccacagatttcagagcattgaccgtagtatacccccggtcgtgtagcggtgaaagtggtttggtt

SEQ ID NO: 80384 - DNA, 120 bp, Homo sapiens
  misc_feature: 510 for SV(C|O) and mtDNA
caccgcggtcacacgattaacccaagtcaatagaagccggcgtaaagagtgttttagatcaccccctccccaataaagctaaaactcacctgagttgtaaaaaactccagctgacacaaa

SEQ ID NO: 80385 - DNA, 120 bp, Homo sapiens
  misc_feature: 510 for SV(C|O) and mtDNA
tctcatcgctacctccctgacaagcgcctatagcactcgaataattcttctcaccctaacaggtcaacctcgcttccccacccttactaacattaacgaaaataaccccaccctactaaa

SEQ ID NO: 80386 - DNA, 120 bp, Homo sapiens
  misc_feature: 510 for SV(C|O) and mtDNA
ttaaacacaaactaccacctacctccctcaccaaagcccataaaaataaaaaattataacaaaccctgagaaccaaaatgaacgaaaatctgttcgcttcattcattgcccccacaatcc

SEQ ID NO: 80387 - DNA, 120 bp, Homo sapiens
  misc_feature: 510 for SV(C|O) and mtDNA
tgtttattataataatgtttgtgtattcggctatgaagaataaggcgaaggggcctgcggcgtattcgatgttgaagcctgagactagttcggactctccttcggcaaggtcgaaggggg

SEQ ID NO: 80388 - DNA, 120 bp, Homo sapiens; identical to SEQ ID NO: 62651
  misc_feature: 510 for SV(C|O) and mtDNA

SEQ ID NO: 80389 - DNA, 120 bp, Homo sapiens
  misc_feature: 510 for SV(C|O) and mtDNA
tgctaaaggttaatcactgctgtttcccgtgggggtgtggctaggctaagcgttttgagctgcattgctgcgtgcttgatgcttgtcccttttgatcgtggtgatttagagggtgaactc

SEQ ID NO: 80390 - DNA, 120 bp, Homo sapiens
  misc_feature: 510 for SV(C|O) and mtDNA
tgcaggaatgctaggtgtggttggttgatgccgattgtaactattatgagtcctagttgacttgaagtggagaaggctacgatttttttgatgtcattttgtgtaagggcgcagactgct

SEQ ID NO: 80391 - DNA, 120 bp, Homo sapiens
  misc_feature: 510 for SV(C|O) and mtDNA
tgacgttgacaatcgagtagtactcccgattgaagcccccattcgtataataattacatcacaagacgtcttgcactcatgagctgtccccacattaggcttaaaaacagatgcaattcc

SEQ ID NO: 80392 - DNA, 120 bp, Homo sapiens
  misc_feature: 510 for SV(C|O) and mtDNA
gacgtcttgtgatgtaattattatacgaatgggggcttcaatcgggagtactactcgattgtcaacgtcaaggagtcgcaggtcgcctggttctaggaataatgggggaagtatgtagga

SEQ ID NO: 80393 - DNA, 120 bp, Homo sapiens
  misc_feature: 510 for SV(C|O) and mtDNA
tcactgctgtttcccgtgggggtgtggctaggctaagcgttttgagctgcattgctgcgtgcttgatgcttgtcccttttgatcgtggtgatttagagggtgaactcactggaacgggga

SEQ ID NO: 80394 - DNA, 120 bp, Homo sapiens
  misc_feature: 510 for SV(C|O) and mtDNA
tcattctgaggggccacagtaattacaaacttactatccgccatcccatacattgggacagacctagttcaatgaatctgaggaggctactcagtagacagtcccaccctcacacgattc

SEQ ID NO: 80395 - DNA, 120 bp, Homo sapiens; identical to SEQ ID NO: 62919
  misc_feature: 510 for SV(C|O) and mtDNA

SEQ ID NO: 80396 - DNA, 120 bp, Homo sapiens; identical to SEQ ID NO: 61528
  misc_feature: 510 for SV(C|O) and mtDNA

SEQ ID NO: 80397 - DNA, 120 bp, Homo sapiens
  misc_feature: 510 for SV(C|O) and mtDNA
taaaggttaatcactgctgtttcccgtgggggtgtggctaggctaagcgttttgagctgcattgctgcgtgcttgatgcttgtcccttttgatcgtggtgatttagagggtgaactcact

SEQ ID NO: 80398 - DNA, 120 bp, Homo sapiens
  misc_feature: 510 for SV(C|O) and mtDNA
gtgttttagatcaccccctccccaataaagctaaaactcacctgagttgtaaaaaactccagctgacacaaaatagactacgaaagtggctttaacatatctgaacacacaatagctaag

SEQ ID NO: 80399 - DNA, 120 bp, Homo sapiens
  misc_feature: 510 for SV(C|O) and mtDNA
agccaccgcggtcacacgattaacccaagtcaatagaagccggcgtaaagagtgttttagatcaccccctccccaataaagctaaaactcacctgagttgtaaaaaactccagctgacac

SEQ ID NO: 80400 - DNA, 120 bp, Homo sapiens
  misc_feature: 510 for SV(C|O) and mtDNA
ggtactgaacctacgagtacaccgactacggcggactaatcttcaactcctacatacttcccccattattcctagaaccaggcgacctgcgactccttgacgttgacaatcgagtagtac

SEQ ID NO: 80401 - DNA, 120 bp, Homo sapiens; identical to SEQ ID NO: 58861
  misc_feature: 510 for SV(C|O) and mtDNA

SEQ ID NO: 80402 - DNA, 120 bp, Homo sapiens
  misc_feature: 510 for SV(C|O) and mtDNA
gcgaaggggcctgcggcgtattcgatgttgaagcctgagactagttcggactctccttcggcaaggtcgaagggggttcggttggtctctgctagtgtggagataaatcatattatggcc

SEQ ID NO: 80403 - DNA, 120 bp, Homo sapiens; identical to SEQ ID NO: 60833
  misc_feature: 510 for SV(C|O) and mtDNA

SEQ ID NO: 80404 - DNA, 120 bp, Homo sapiens; identical to SEQ ID NO: 62439
  misc_feature: 510 for SV(C|O) and mtDNA

SEQ ID NO: 80405 - DNA, 120 bp, Homo sapiens; identical to SEQ ID NO: 57910
  misc_feature: 510 for SV(C|O) and mtDNA

SEQ ID NO: 80406 - DNA, 120 bp, Homo sapiens
  misc_feature: 510 for SV(C|O) and mtDNA
agatatttggaggtggggatcaatagagggggaaatagaatgatcagtactgcggcgggtaggcctaggattgtgggggcaatgaatgaagcgaacagattttcgttcattttggttctc

SEQ ID NO: 80407 - DNA, 120 bp, Homo sapiens
  misc_feature: 510 for SV(C|O) and mtDNA
atcatccacaaccttaacaatgaacaagatatccgaaaaataggaggactactcaaaaccatacctctcacttcaacctccctcaccattggcagcctagcattagcaggaatacctttc

SEQ ID NO: 80408 - DNA, 120 bp, Homo sapiens
  misc_feature: 510 for SV(C|O) and mtDNA
ctgtttcccgtgggggtgtggctaggctaagcgttttgagctgcattgctgcgtgcttgatgcttgtcccttttgatcgtggtgatttagagggtgaactcactggaacggggatgcttg

SEQ ID NO: 80409 - DNA, 120 bp, Homo sapiens; identical to SEQ ID NO: 58691
  misc_feature: 510 for SV(C|O) and mtDNA

SEQ ID NO: 80410 - DNA, 120 bp, Homo sapiens
  misc_feature: 510 for SV(C|O) and mtDNA
cgctgtgatgagtgtgcctgcaaagatggtagagtagatgacgggttgggccaggggattaattagtacgggaagggtataaccaacattttcggggtatgggcccgatagcttatttag

SEQ ID NO: 80411 - DNA, 120 bp, Homo sapiens
  misc_feature: 510 for SV(C|O) and mtDNA
cccccctccccatacccaaccccctggtcaacctcaacctaggcctcctatttattctagccacctctagcctagccgtttactcaatcctctgatcagggtgagcatcaaactcaaact

SEQ ID NO: 80412 - DNA, 120 bp, Homo sapiens
  misc_feature: 510 for SV(C|O) and mtDNA
cattctgaggggccacagtaattacaaacttactatccgccatcccatacattgggacagacctagttcaatgaatctgaggaggctactcagtagacagtcccaccctcacacgattct

SEQ ID NO: 80413 - DNA, 120 bp, Homo sapiens
  misc_feature: 510 for SV(C|O) and mtDNA
cagttgaggtggattaaaccaaacccagctacgcaaaatcttagcatactcctcaattacccacataggatgaataatagcagttctaccgtacaaccctaacataaccattcttaattt

SEQ ID NO: 80414 - DNA, 120 bp, Homo sapiens
  misc_feature: 510 for SV(C|O) and mtDNA
atccaaaattctccgtgccacctatcacaccccatcctaaagtaaggtcagctaaataagctatcgggcccataccccgaaaatgttggttatacccttcccgtactaattaatcccctg

SEQ ID NO: 80415 - DNA, 120 bp, Homo sapiens
  misc_feature: 510 for SV(C|O) and mtDNA
caagagtgctactctcctcgctccgggcccataacacttgggggtagctaaagtgaactgtatccgacatctggttcctacttcagggccataaagcctaaatagcccacacgttcccct

SEQ ID NO: 80416 - DNA, 120 bp, Homo sapiens; identical to SEQ ID NO: 56180
  misc_feature: 510 for SV(C|O) and mtDNA

SEQ ID NO: 80417 - DNA, 120 bp, Homo sapiens
  misc_feature: 510 for SV(C|O) and mtDNA
agagggggtagagggggtgctatagggtaaatacgggccctatttcaaagatttttaggggaattaattctaggacgatgggcatgaaactgtggtttgctccacagatttcagagcatt

SEQ ID NO: 80418 - DNA, 120 bp, Homo sapiens; identical to SEQ ID NO: 62920
  misc_feature: 509 for SV(C|O) and mtDNA

SEQ ID NO: 80419 - DNA, 120 bp, Homo sapiens
  misc_feature: 509 for SV(C|O) and mtDNA
gtggagcaaaccacagtttcatgcccatcgtcctagaattaattcccctaaaaatctttgaaatagggcccgtatttaccctatagcaccccctctaccccctctagagcccactgtaaa

SEQ ID NO: 80420 - DNA, 120 bp, Homo sapiens
  misc_feature: 509 for SV(C|O) and mtDNA
ttaacctctccacccttatcacaacacaagaacacctctgattactcctgccatcatgacccttggccataatatgatttatctccacactagcagagaccaaccgaacccccttcgacc

SEQ ID NO: 80421 - DNA, 120 bp, Homo sapiens
  misc_feature: 509 for SV(C|O) and mtDNA
tggctttgaagaaggcgtgggtacagatgtgcaggaatgctaggtgtggttggttgatgccgattgtaactattatgagtcctagttgacttgaagtggagaaggctacgatttttttga

SEQ ID NO: 80422 - DNA, 120 bp, Homo sapiens; identical to SEQ ID NO: 60847
  misc_feature: 509 for SV(C|O) and mtDNA

SEQ ID NO: 80423 - DNA, 120 bp, Homo sapiens
  misc_feature: 509 for SV(C|O) and mtDNA
tgatcccgtttcgtgcaagaataggaggtggagtgctgctagggctgcaataatgaagggcaagatgaagtgaaaggtaaagaatcgtgtgagggtgggactgtctactgagtagcctcc

SEQ ID NO: 80424 - DNA, 120 bp, Homo sapiens; identical to SEQ ID NO: 59346
  misc_feature: 509 for SV(C|O) and mtDNA

SEQ ID NO: 80425 - DNA, 120 bp, Homo sapiens
  misc_feature: 509 for SV(C|O) and mtDNA
tcagggtgagcatcaaactcaaactacgccctgatcggcgcactgcgagcagtagcccaaacaatctcatatgaagtcaccctagccatcattctactatcaacattactaataagtggc

SEQ ID NO: 80426 - DNA, 120 bp, Homo sapiens
  misc_feature: 509 for SV(C|O) and mtDNA
tcagcccaattaggtctccacccctgactcccctcagccatagaaggccccaccccagtctcagccctactccactcaagcactatagttgtagcaggaatcttcttactcatccgcttc

SEQ ID NO: 80427 - DNA, 120 bp, Homo sapiens
  misc_feature: 509 for SV(C|O) and mtDNA
tatcattctgaggggccacagtaattacaaacttactatccgccatcccatacattgggacagacctagttcaatgaatctgaggaggctactcagtagacagtcccaccctcacacgat

SEQ ID NO: 80428 - DNA, 120 bp, Homo sapiens; identical to SEQ ID NO: 57807
  misc_feature: 509 for SV(C|O) and mtDNA

SEQ ID NO: 80429 - DNA, 120 bp, Homo sapiens
  misc_feature: 509 for SV(C|O) and mtDNA
cagggtgaccgaaaaatcagaataggtgttggtatagaatggggtctcctcctccggcggggtcgaagaaggtggtgttgaggttgcggtctgttagtagtatagtgatgccagcagcta

SEQ ID NO: 80430 - DNA, 120 bp, Homo sapiens; identical to SEQ ID NO: 58242
  misc_feature: 509 for SV(C|O) and mtDNA

SEQ ID NO: 80431 - DNA, 120 bp, Homo sapiens
  misc_feature: 509 for SV(C|O) and mtDNA
ctatgaacccccctccccatacccaaccccctggtcaacctcaacctaggcctcctatttattctagccacctctagcctagccgtttactcaatcctctgatcagggtgagcatcaaac

SEQ ID NO: 80432 - DNA, 120 bp, Homo sapiens
  misc_feature: 509 for SV(C|O) and mtDNA
gtttattataataatgtttgtgtattcggctatgaagaataaggcgaaggggcctgcggcgtattcgatgttgaagcctgagactagttcggactctccttcggcaaggtcgaagggggt

SEQ ID NO: 80433 - DNA, 120 bp, Homo sapiens
  misc_feature: 509 for SV(C|O) and mtDNA
gtatgtgctttctcgtgttacatcgcgccatcattggtatatggttagtgtgttggttagtaggcctagtatgaggagcgttatggagtggaagtgaaatcacatggctaggccggaggt

SEQ ID NO: 80434 - DNA, 120 bp, Homo sapiens
  misc_feature: 509 for SV(C|O) and mtDNA
gggtagagggggtgctatagggtaaatacgggccctatttcaaagatttttaggggaattaattctaggacgatgggcatgaaactgtggtttgctccacagatttcagagcattgaccg

SEQ ID NO: 80435 - DNA, 120 bp, Homo sapiens
  misc_feature: 509 for SV(C|O) and mtDNA
ggcctgcggcgtattcgatgttgaagcctgagactagttcggactctccttcggcaaggtcgaagggggttcggttggtctctgctagtgtggagataaatcatattatggccaagggtc

SEQ ID NO: 80436 - DNA, 120 bp, Homo sapiens
  misc_feature: 509 for SV(C|O) and mtDNA
gacaaaatatgttgtgtagagttcaggggagagtgcgtcatatgttgttcctaggaagattgtagtggtgagggtgtttattataataatgtttgtgtattcggctatgaagaataaggc

SEQ ID NO: 80437 - DNA, 120 bp, Homo sapiens; identical to SEQ ID NO: 62703
  misc_feature: 509 for SV(C|O) and mtDNA

SEQ ID NO: 80438 - DNA, 120 bp, Homo sapiens; identical to SEQ ID NO: 60740
  misc_feature: 509 for SV(C|O) and mtDNA

SEQ ID NO: 80439 - DNA, 120 bp, Homo sapiens
  misc_feature: 509 for SV(C|O) and mtDNA
ctgagaaccaaaatgaacgaaaatctgttcgcttcattcattgcccccacaatcctaggcctacccgccgcagtactgatcattctatttccccctctattgatccccacctccaaatat

SEQ ID NO: 80440 - DNA, 120 bp, Homo sapiens
  misc_feature: 509 for SV(C|O) and mtDNA
acgtcttgtgatgtaattattatacgaatgggggcttcaatcgggagtactactcgattgtcaacgtcaaggagtcgcaggtcgcctggttctaggaataatgggggaagtatgtaggag

SEQ ID NO: 80441 - DNA, 120 bp, Homo sapiens
  misc_feature: 509 for SV(C|O) and mtDNA
ataaatagtatggctttgaagaaggcgtgggtacagatgtgcaggaatgctaggtgtggttggttgatgccgattgtaactattatgagtcctagttgacttgaagtggagaaggctacg

SEQ ID NO: 80442 - DNA, 120 bp, Homo sapiens
  misc_feature: 509 for SV(C|O) and mtDNA
cctagcattcctgcacatctgtacccacgccttcttcaaagccatactatttatgtgctccgggtccatcatccacaaccttaacaatgaacaagatatccgaaaaataggaggactact

SEQ ID NO: 80443 - DNA, 120 bp, Homo sapiens
  misc_feature: 509 for SV(C|O) and mtDNA
attataataatgtttgtgtattcggctatgaagaataaggcgaaggggcctgcggcgtattcgatgttgaagcctgagactagttcggactctccttcggcaaggtcgaagggggttcgg

SEQ ID NO: 80444 - DNA, 120 bp, Homo sapiens
  misc_feature: 509 for SV(C|O) and mtDNA
atcagggtgagcatcaaactcaaactacgccctgatcggcgcactgcgagcagtagcccaaacaatctcatatgaagtcaccctagccatcattctactatcaacattactaataagtgg

SEQ ID NO: 80445 - DNA, 120 bp, Homo sapiens
  misc_feature: 509 for SV(C|O) and mtDNA
attctgatttttcggtcaccctgaagtttatattcttatcctaccaggcttcggaataatctcccatattgtaacttactactccggaaaaaaagaaccatttggatacataggtatggt

SEQ ID NO: 80446 - DNA, 120 bp, Homo sapiens
  misc_feature: 509 for SV(C|O) and mtDNA
agggtaaatacgggccctatttcaaagatttttaggggaattaattctaggacgatgggcatgaaactgtggtttgctccacagatttcagagcattgaccgtagtatacccccggtcgt

SEQ ID NO: 80447 - DNA, 120 bp, Homo sapiens; identical to SEQ ID NO: 59706
  misc_feature: 509 for SV(C|O) and mtDNA

SEQ ID NO: 80448 - DNA, 120 bp, Homo sapiens
  misc_feature: 508 for SV(C|O) and mtDNA
tttttcataggaggtgtatgagttggtcgtagcggaatcgggggtatgctgttcgaattcataagaacagggaggttagaagtagggtcttggtgacaaaatatgttgtgtagagttcag

SEQ ID NO: 80449 - DNA, 120 bp, Homo sapiens
  misc_feature: 508 for SV(C|O) and mtDNA
tttgatgctcaccctgatcagaggattgagtaaacggctaggctagaggtggctagaataaataggaggcctaggttgaggttgaccagggggttgggtatggggaggggggttcatagt

SEQ ID NO: 80450 - DNA, 120 bp, Homo sapiens
  misc_feature: 508 for SV(C|O) and mtDNA
tttctgctagggggtggaagcggatgagtaagaagattcctgctacaactatagtgcttgagtggagtagggctgagactggggtggggccttctatggctgaggggagtcaggggtgga

SEQ ID NO: 80451 - DNA, 120 bp, Homo sapiens
  misc_feature: 508 for SV(C|O) and mtDNA
ttgatcccgtttcgtgcaagaataggaggtggagtgctgctagggctgcaataatgaagggcaagatgaagtgaaaggtaaagaatcgtgtgagggtgggactgtctactgagtagcctc

SEQ ID NO: 80452 - DNA, 120 bp, Homo sapiens
  misc_feature: 508 for SV(C|O) and mtDNA
ttgaggtggattaaaccaaacccagctacgcaaaatcttagcatactcctcaattacccacataggatgaataatagcagttctaccgtacaaccctaacataaccattcttaatttaac

SEQ ID NO: 80453 - DNA, 120 bp, Homo sapiens
  misc_feature: 508 for SV(C|O) and mtDNA
ggttaatcactgctgtttcccgtgggggtgtggctaggctaagcgttttgagctgcattgctgcgtgcttgatgcttgtcccttttgatcgtggtgatttagagggtgaactcactggaa

SEQ ID NO: 80454 - DNA, 120 bp, Homo sapiens
  misc_feature: 508 for SV(C|O) and mtDNA
tgtttcccgtgggggtgtggctaggctaagcgttttgagctgcattgctgcgtgcttgatgcttgtcccttttgatcgtggtgatttagagggtgaactcactggaacggggatgcttgc

SEQ ID NO: 80455 - DNA, 120 bp, Homo sapiens; identical to SEQ ID NO: 60633
  misc_feature: 508 for SV(C|O) and mtDNA

SEQ ID NO: 80456 - DNA, 120 bp, Homo sapiens
  misc_feature: 508 for SV(C|O) and mtDNA
tggagcaaaccacagtttcatgcccatcgtcctagaattaattcccctaaaaatctttgaaatagggcccgtatttaccctatagcaccccctctaccccctctagagcccactgtaaag

SEQ ID NO: 80457 - DNA, 120 bp, Homo sapiens
  misc_feature: 508 for SV(C|O) and mtDNA
agcaataaacgaaagtttaactaagctatactaaccccagggttggtcaatttcgtgccagccaccgcggtcacacgattaacccaagtcaatagaagccggcgtaaagagtgttttaga

SEQ ID NO: 80458 - DNA, 120 bp, Homo sapiens; identical to SEQ ID NO: 59016
  misc_feature: 508 for SV(C|O) and mtDNA

SEQ ID NO: 80459 - DNA, 120 bp, Homo sapiens
  misc_feature: 508 for SV(C|O) and mtDNA
gcttccggctgtcaggcgtttaatggggtttagtagggtggggttattttcgttaatgttagtaagggtggggaagcgaggttgacctgttagggtgagaagaattattcgagtgctata

SEQ ID NO: 80460 - DNA, 120 bp, Homo sapiens; identical to SEQ ID NO: 59259
  misc_feature: 508 for SV(C|O) and mtDNA

SEQ ID NO: 80461 - DNA, 120 bp, Homo sapiens; identical to SEQ ID NO: 62119
  misc_feature: 508 for SV(C|O) and mtDNA

SEQ ID NO: 80462 - DNA, 120 bp, Homo sapiens
  misc_feature: 508 for SV(C|O) and mtDNA
tactgaacctacgagtacaccgactacggcggactaatcttcaactcctacatacttcccccattattcctagaaccaggcgacctgcgactccttgacgttgacaatcgagtagtactc

SEQ ID NO: 80463 - DNA, 120 bp, Homo sapiens; identical to SEQ ID NO: 58381
  misc_feature: 508 for SV(C|O) and mtDNA

SEQ ID NO: 80464 - DNA, 120 bp, Homo sapiens; identical to SEQ ID NO: 60029
  misc_feature: 508 for SV(C|O) and mtDNA

SEQ ID NO: 80465 - DNA, 120 bp, Homo sapiens
  misc_feature: 508 for SV(C|O) and mtDNA
gttagggtgagaagaattattcgagtgctataggcgcttgtcagggaggtagcgatgagagtaatagatagggctcaggcgtttgtgtatgatatgtttgcggtttcgatgatgtggtct

SEQ ID NO: 80466 - DNA, 120 bp, Homo sapiens
  misc_feature: 508 for SV(C|O) and mtDNA
caaaccacagtttcatgcccatcgtcctagaattaattcccctaaaaatctttgaaatagggcccgtatttaccctatagcaccccctctaccccctctagagcccactgtaaagctaac

SEQ ID NO: 80467 - DNA, 120 bp, Homo sapiens
  misc_feature: 508 for SV(C|O) and mtDNA
ggtagagggggtgctatagggtaaatacgggccctatttcaaagatttttaggggaattaattctaggacgatgggcatgaaactgtggtttgctccacagatttcagagcattgaccgt

SEQ ID NO: 80468 - DNA, 120 bp, Homo sapiens
  misc_feature: 508 for SV(C|O) and mtDNA
gcccttacacaaaatgacatcaaaaaaatcgtagccttctccacttcaagtcaactaggactcataatagttacaatcggcatcaaccaaccacacctagcattcctgcacatctgtacc

SEQ ID NO: 80469 - DNA, 120 bp, Homo sapiens
  misc_feature: 508 for SV(C|O) and mtDNA
gggtaaatacgggccctatttcaaagatttttaggggaattaattctaggacgatgggcatgaaactgtggtttgctccacagatttcagagcattgaccgtagtatacccccggtcgtg

SEQ ID NO: 80470 - DNA, 120 bp, Homo sapiens
  misc_feature: 508 for SV(C|O) and mtDNA
catttcactgtaaagaggtgttggttctcttaatctttaacttaaaaggttaatgctaagttagctttacagtgggctctagagggggtagagggggtgctatagggtaaatacgggccc

SEQ ID NO: 80471 - DNA, 120 bp, Homo sapiens
  misc_feature: 508 for SV(C|O) and mtDNA
ggcgccattggcgtgaaggtagcggatgattcagccataatttacgtctcgagtgatgtgggcgattgatgaaaaggcggttgaggcgtctggtgagtagtgcatggctaggaatagtcc

SEQ ID NO: 80472 - DNA, 120 bp, Homo sapiens
  misc_feature: 508 for SV(C|O) and mtDNA
gccttggtatgtgctttctcgtgttacatcgcgccatcattggtatatggttagtgtgttggttagtaggcctagtatgaggagcgttatggagtggaagtgaaatcacatggctaggcc

SEQ ID NO: 80473 - DNA, 120 bp, Homo sapiens
  misc_feature: 508 for SV(C|O) and mtDNA
gaggcgccattggcgtgaaggtagcggatgattcagccataatttacgtctcgagtgatgtgggcgattgatgaaaaggcggttgaggcgtctggtgagtagtgcatggctaggaatagt

SEQ ID NO: 80474 - DNA, 120 bp, Homo sapiens
  misc_feature: 508 for SV(C|O) and mtDNA
aggcgccattggcgtgaaggtagcggatgattcagccataatttacgtctcgagtgatgtgggcgattgatgaaaaggcggttgaggcgtctggtgagtagtgcatggctaggaatagtc

SEQ ID NO: 80475 - DNA, 120 bp, Homo sapiens; identical to SEQ ID NO: 62140
  misc_feature: 508 for SV(C|O) and mtDNA

SEQ ID NO: 80476 - DNA, 120 bp, Homo sapiens
  misc_feature: 508 for SV(C|O) and mtDNA
cccccatgcctcaggatactcctcaatagccatcgctgtagtatatccaaagacaaccatcattccccctaaataaattaaaaaaactattaaacccatataacctcccccaaaattcag

SEQ ID NO: 80477 - DNA, 120 bp, Homo sapiens; identical to SEQ ID NO: 54300
  misc_feature: 508 for SV(C|O) and mtDNA

SEQ ID NO: 80478 - DNA, 120 bp, Homo sapiens; identical to SEQ ID NO: 61634
  misc_feature: 508 for SV(C|O) and mtDNA

SEQ ID NO: 80479 - DNA, 120 bp, Homo sapiens; identical to SEQ ID NO: 58252
  misc_feature: 508 for SV(C|O) and mtDNA

SEQ ID NO: 80480 - DNA, 120 bp, Homo sapiens
  misc_feature: 508 for SV(C|O) and mtDNA
acgtggttactagcacagagagttctcccagtaggttaatagtggggggtaaggcgaggttagcgaggcttgctagaagtcatcaaaaagctattagtgggagtagagtttgaagtcctt

SEQ ID NO: 80481 - DNA, 120 bp, Homo sapiens
  misc_feature: 507 for SV(C|O) and mtDNA
ttttttcataggaggtgtatgagttggtcgtagcggaatcgggggtatgctgttcgaattcataagaacagggaggttagaagtagggtcttggtgacaaaatatgttgtgtagagttca

SEQ ID NO: 80482 - DNA, 120 bp, Homo sapiens
  misc_feature: 507 for SV(C|O) and mtDNA
accgcggtcacacgattaacccaagtcaatagaagccggcgtaaagagtgttttagatcaccccctccccaataaagctaaaactcacctgagttgtaaaaaactccagctgacacaaaa

SEQ ID NO: 80483 - DNA, 120 bp, Homo sapiens
  misc_feature: 507 for SV(C|O) and mtDNA
tacaatatgggagattattccgaagcctggtaggataagaatataaacttcagggtgaccgaaaaatcagaataggtgttggtatagaatggggtctcctcctccggcggggtcgaagaa

SEQ ID NO: 80484 - DNA, 120 bp, Homo sapiens; identical to SEQ ID NO: 57262
  misc_feature: 507 for SV(C|O) and mtDNA

SEQ ID NO: 80485 - DNA, 120 bp, Homo sapiens
  misc_feature: 507 for SV(C|O) and mtDNA
gcaaaccacagtttcatgcccatcgtcctagaattaattcccctaaaaatctttgaaatagggcccgtatttaccctatagcaccccctctaccccctctagagcccactgtaaagctaa

SEQ ID NO: 80486 - DNA, 120 bp, Homo sapiens; identical to SEQ ID NO: 59231
  misc_feature: 507 for SV(C|O) and mtDNA

SEQ ID NO: 80487 - DNA, 120 bp, Homo sapiens
  misc_feature: 507 for SV(C|O) and mtDNA
gtgagccccattgtgttgtggtaaatatgtagagggagtatagggctgtgactagtatgttgagtcctgtaagtaggagagtgatatttgatcaggagaacgtggttactagcacagaga

SEQ ID NO: 80488 - DNA, 120 bp, Homo sapiens
  misc_feature: 507 for SV(C|O) and mtDNA
cttaccatcaaatcaattggccaccaatggtactgaacctacgagtacaccgactacggcggactaatcttcaactcctacatacttcccccattattcctagaaccaggcgacctgcga

SEQ ID NO: 80489 - DNA, 120 bp, Homo sapiens; identical to SEQ ID NO: 59984
  misc_feature: 507 for SV(C|O) and mtDNA

SEQ ID NO: 80490 - DNA, 120 bp, Homo sapiens; identical to SEQ ID NO: 60409
  misc_feature: 507 for SV(C|O) and mtDNA

SEQ ID NO: 80491 - DNA, 120 bp, Homo sapiens; identical to SEQ ID NO: 56492
  misc_feature: 507 for SV(C|O) and mtDNA

SEQ ID NO: 80492 - DNA, 120 bp, Homo sapiens
  misc_feature: 507 for SV(C|O) and mtDNA
agagtgctactctcctcgctccgggcccataacacttgggggtagctaaagtgaactgtatccgacatctggttcctacttcagggccataaagcctaaatagcccacacgttcccctta

SEQ ID NO: 80493 - DNA, 120 bp, Homo sapiens
  misc_feature: 507 for SV(C|O) and mtDNA
caggcagttgaggtggattaaaccaaacccagctacgcaaaatcttagcatactcctcaattacccacataggatgaataatagcagttctaccgtacaaccctaacataaccattctta

SEQ ID NO: 80494 - DNA, 120 bp, Homo sapiens
  misc_feature: 507 for SV(C|O) and mtDNA
gtgtttattataataatgtttgtgtattcggctatgaagaataaggcgaaggggcctgcggcgtattcgatgttgaagcctgagactagttcggactctccttcggcaaggtcgaagggg

SEQ ID NO: 80495 - DNA, 120 bp, Homo sapiens
  misc_feature: 507 for SV(C|O) and mtDNA
acctagcattcctgcacatctgtacccacgccttcttcaaagccatactatttatgtgctccgggtccatcatccacaaccttaacaatgaacaagatatccgaaaaataggaggactac

SEQ ID NO: 80496 - DNA, 120 bp, Homo sapiens; identical to SEQ ID NO: 62739
  misc_feature: 507 for SV(C|O) and mtDNA

SEQ ID NO: 80497 - DNA, 120 bp, Homo sapiens
  misc_feature: 507 for SV(C|O) and mtDNA
acaagagtgctactctcctcgctccgggcccataacacttgggggtagctaaagtgaactgtatccgacatctggttcctacttcagggccataaagcctaaatagcccacacgttcccc

SEQ ID NO: 80498 - DNA, 120 bp, Homo sapiens
  misc_feature: 507 for SV(C|O) and mtDNA
gggagaagccccggcaggtttgaagctgcttcttcgaatttgcaattcaatatgaaaatcacctcggagctggtaaaaagaggcctaacccctgtctttagatttacagtccaatgcttc

SEQ ID NO: 80499 - DNA, 120 bp, Homo sapiens
  misc_feature: 507 for SV(C|O) and mtDNA
ggcgaaggggcctgcggcgtattcgatgttgaagcctgagactagttcggactctccttcggcaaggtcgaagggggttcggttggtctctgctagtgtggagataaatcatattatggc

SEQ ID NO: 80500 - DNA, 120 bp, Homo sapiens
  misc_feature: 507 for SV(C|O) and mtDNA
ggaggttatatgggtttaatagtttttttaatttatttagggggaatgatggttgtctttggatatactacagcgatggctattgaggagtatcctgaggcatgggggtcaggggttgag

SEQ ID NO: 80501 - DNA, 120 bp, Homo sapiens; identical to SEQ ID NO: 58003
  misc_feature: 507 for SV(C|O) and mtDNA

SEQ ID NO: 80502 - DNA, 120 bp, Homo sapiens
  misc_feature: 507 for SV(C|O) and mtDNA
gcacataaatagtatggctttgaagaaggcgtgggtacagatgtgcaggaatgctaggtgtggttggttgatgccgattgtaactattatgagtcctagttgacttgaagtggagaaggc

SEQ ID NO: 80503 - DNA, 120 bp, Homo sapiens
  misc_feature: 507 for SV(C|O) and mtDNA
ctattctgatttttcggtcaccctgaagtttatattcttatcctaccaggcttcggaataatctcccatattgtaacttactactccggaaaaaaagaaccatttggatacataggtatg

SEQ ID NO: 80504 - DNA, 120 bp, Homo sapiens
  misc_feature: 507 for SV(C|O) and mtDNA
ccctccccatacccaaccccctggtcaacctcaacctaggcctcctatttattctagccacctctagcctagccgtttactcaatcctctgatcagggtgagcatcaaactcaaactacg

SEQ ID NO: 80505 - DNA, 120 bp, Homo sapiens; identical to SEQ ID NO: 63003
  misc_feature: 507 for SV(C|O) and mtDNA

SEQ ID NO: 80506 - DNA, 120 bp, Homo sapiens
  misc_feature: 507 for SV(C|O) and mtDNA
ccgcggtcacacgattaacccaagtcaatagaagccggcgtaaagagtgttttagatcaccccctccccaataaagctaaaactcacctgagttgtaaaaaactccagctgacacaaaat

SEQ ID NO: 80507 - DNA, 120 bp, Homo sapiens
  misc_feature: 507 for SV(C|O) and mtDNA
atcactgctgtttcccgtgggggtgtggctaggctaagcgttttgagctgcattgctgcgtgcttgatgcttgtcccttttgatcgtggtgatttagagggtgaactcactggaacgggg

SEQ ID NO: 80508 - DNA, 120 bp, Homo sapiens
  misc_feature: 507 for SV(C|O) and mtDNA
cccatacccaaccccctggtcaacctcaacctaggcctcctatttattctagccacctctagcctagccgtttactcaatcctctgatcagggtgagcatcaaactcaaactacgccctg

SEQ ID NO: 80509 - DNA, 120 bp, Homo sapiens
  misc_feature: 507 for SV(C|O) and mtDNA
caaagatttttaggggaattaattctaggacgatgggcatgaaactgtggtttgctccacagatttcagagcattgaccgtagtatacccccggtcgtgtagcggtgaaagtggtttggt

SEQ ID NO: 80510 - DNA, 120 bp, Homo sapiens
  misc_feature: 507 for SV(C|O) and mtDNA
atttcaaagatttttaggggaattaattctaggacgatgggcatgaaactgtggtttgctccacagatttcagagcattgaccgtagtatacccccggtcgtgtagcggtgaaagtggtt

SEQ ID NO: 80511 - DNA, 120 bp, Homo sapiens
  misc_feature: 507 for SV(C|O) and mtDNA
aagaagaaagagaggaagtaaagtttaattatgcctttttgggttgaggtgatgatggaggtggagatttggtgctgtgaaattgttttaggtaatagcttttctagtcaggttaggtct

SEQ ID NO: 80512 - DNA, 120 bp, Homo sapiens
  misc_feature: 507 for SV(C|O) and mtDNA
aaaataccaaatgcatggagagctcccgtgagtggttaatagggtgatagacctgtgatccatcgtgatgtcttatttaaggggaacgtgtgggctatttaggctttatggccctgaagt

SEQ ID NO: 80513 - DNA, 120 bp, Homo sapiens
  misc_feature: 506 for SV(C|O) and mtDNA
cgaaaataccaaatgcatggagagctcccgtgagtggttaatagggtgatagacctgtgatccatcgtgatgtcttatttaaggggaacgtgtgggctatttaggctttatggccctgaa

SEQ ID NO: 80514 - DNA, 120 bp, Homo sapiens
  misc_feature: 506 for SV(C|O) and mtDNA
tgaggtggattaaaccaaacccagctacgcaaaatcttagcatactcctcaattacccacataggatgaataatagcagttctaccgtacaaccctaacataaccattcttaatttaact

SEQ ID NO: 80515 - DNA, 120 bp, Homo sapiens; identical to SEQ ID NO: 60058
  misc_feature: 506 for SV(C|O) and mtDNA

SEQ ID NO: 80516 - DNA, 120 bp, Homo sapiens
  misc_feature: 506 for SV(C|O) and mtDNA
tccttaacctctacttctacctacgcctaatctactccacctcaatcacactactccccatatctaacaacgtaaaaataaaatgacagtttgaacatacaaaacccaccccattcctcc

SEQ ID NO: 80517 - DNA, 120 bp, Homo sapiens; identical to SEQ ID NO: 59137
  misc_feature: 506 for SV(C|O) and mtDNA

SEQ ID NO: 80518 - DNA, 120 bp, Homo sapiens
  misc_feature: 506 for SV(C|O) and mtDNA
tcccgtgggggtgtggctaggctaagcgttttgagctgcattgctgcgtgcttgatgcttgtcccttttgatcgtggtgatttagagggtgaactcactggaacggggatgcttgcatgt

SEQ ID NO: 80519 - DNA, 120 bp, Homo sapiens; identical to SEQ ID NO: 61001
  misc_feature: 506 for SV(C|O) and mtDNA

SEQ ID NO: 80520 - DNA, 120 bp, Homo sapiens
  misc_feature: 506 for SV(C|O) and mtDNA
tagggtgagaagaattattcgagtgctataggcgcttgtcagggaggtagcgatgagagtaatagatagggctcaggcgtttgtgtatgatatgtttgcggtttcgatgatgtggtcttt

SEQ ID NO: 80521 - DNA, 120 bp, Homo sapiens
  misc_feature: 506 for SV(C|O) and mtDNA
acataaatagtatggctttgaagaaggcgtgggtacagatgtgcaggaatgctaggtgtggttggttgatgccgattgtaactattatgagtcctagttgacttgaagtggagaaggcta

SEQ ID NO: 80522 - DNA, 120 bp, Homo sapiens
  misc_feature: 506 for SV(C|O) and mtDNA
gtaaatacgggccctatttcaaagatttttaggggaattaattctaggacgatgggcatgaaactgtggtttgctccacagatttcagagcattgaccgtagtatacccccggtcgtgta

SEQ ID NO: 80523 - DNA, 120 bp, Homo sapiens; identical to SEQ ID NO: 59553
  misc_feature: 506 for SV(C|O) and mtDNA

SEQ ID NO: 80524 - DNA, 120 bp, Homo sapiens
  misc_feature: 506 for SV(C|O) and mtDNA
taaatacgggccctatttcaaagatttttaggggaattaattctaggacgatgggcatgaaactgtggtttgctccacagatttcagagcattgaccgtagtatacccccggtcgtgtag

SEQ ID NO: 80525 - DNA, 120 bp, Homo sapiens
  misc_feature: 506 for SV(C|O) and mtDNA
gttaatcactgctgtttcccgtgggggtgtggctaggctaagcgttttgagctgcattgctgcgtgcttgatgcttgtcccttttgatcgtggtgatttagagggtgaactcactggaac

SEQ ID NO: 80526 - DNA, 120 bp, Homo sapiens
  misc_feature: 506 for SV(C|O) and mtDNA
cccttcgaccttgccgaaggagagtccgaactagtctcaggcttcaacatcgaatacgccgcaggccccttcgccttattcttcatagccgaatacacaaacattattataataaacacc

SEQ ID NO: 80527 - DNA, 120 bp, Homo sapiens
  misc_feature: 506 for SV(C|O) and mtDNA
ggtggattaaaccaaacccagctacgcaaaatcttagcatactcctcaattacccacataggatgaataatagcagttctaccgtacaaccctaacataaccattcttaatttaactatt

SEQ ID NO: 80528 - DNA, 120 bp, Homo sapiens
  misc_feature: 506 for SV(C|O) and mtDNA
cacaagagtgctactctcctcgctccgggcccataacacttgggggtagctaaagtgaactgtatccgacatctggttcctacttcagggccataaagcctaaatagcccacacgttccc

SEQ ID NO: 80529 - DNA, 120 bp, Homo sapiens
  misc_feature: 506 for SV(C|O) and mtDNA
ccatcatgacccttggccataatatgatttatctccacactagcagagaccaaccgaacccccttcgaccttgccgaaggagagtccgaactagtctcaggcttcaacatcgaatacgcc

SEQ ID NO: 80530 - DNA, 120 bp, Homo sapiens
  misc_feature: 506 for SV(C|O) and mtDNA
ctccccatacccaaccccctggtcaacctcaacctaggcctcctatttattctagccacctctagcctagccgtttactcaatcctctgatcagggtgagcatcaaactcaaactacgcc

SEQ ID NO: 80531 - DNA, 120 bp, Homo sapiens
  misc_feature: 506 for SV(C|O) and mtDNA
cagcccaattaggtctccacccctgactcccctcagccatagaaggccccaccccagtctcagccctactccactcaagcactatagttgtagcaggaatcttcttactcatccgcttcc

SEQ ID NO: 80532 - DNA, 120 bp, Homo sapiens
  misc_feature: 506 for SV(C|O) and mtDNA
gctgtttcccgtgggggtgtggctaggctaagcgttttgagctgcattgctgcgtgcttgatgcttgtcccttttgatcgtggtgatttagagggtgaactcactggaacggggatgctt

SEQ ID NO: 80533 - DNA, 120 bp, Homo sapiens; identical to SEQ ID NO: 62237
  misc_feature: 506 for SV(C|O) and mtDNA

SEQ ID NO: 80534 - DNA, 120 bp, Homo sapiens
  misc_feature: 506 for SV(C|O) and mtDNA
gagaacgtggttactagcacagagagttctcccagtaggttaatagtggggggtaaggcgaggttagcgaggcttgctagaagtcatcaaaaagctattagtgggagtagagtttgaagt

SEQ ID NO: 80535 - DNA, 120 bp, Homo sapiens
  misc_feature: 506 for SV(C|O) and mtDNA
gaaaataccaaatgcatggagagctcccgtgagtggttaatagggtgatagacctgtgatccatcgtgatgtcttatttaaggggaacgtgtgggctatttaggctttatggccctgaag

SEQ ID NO: 80536 - DNA, 120 bp, Homo sapiens
  misc_feature: 506 for SV(C|O) and mtDNA
cgaataggcttccggctgtcaggcgtttaatggggtttagtagggtggggttattttcgttaatgttagtaagggtggggaagcgaggttgacctgttagggtgagaagaattattcgag

SEQ ID NO: 80537 - DNA, 120 bp, Homo sapiens
  misc_feature: 506 for SV(C|O) and mtDNA
agcacataaatagtatggctttgaagaaggcgtgggtacagatgtgcaggaatgctaggtgtggttggttgatgccgattgtaactattatgagtcctagttgacttgaagtggagaagg

SEQ ID NO: 80538 - DNA, 120 bp, Homo sapiens
  misc_feature: 506 for SV(C|O) and mtDNA
agctcttagtaagattacacatgcaagcatccccgttccagtgagttcaccctctaaatcaccacgatcaaaagggacaagcatcaagcacgcagcaatgcagctcaaaacgcttagcct

SEQ ID NO: 80539 - DNA, 120 bp, Homo sapiens
  misc_feature: 505 for SV(C|O) and mtDNA
tttagcaataaacgaaagtttaactaagctatactaaccccagggttggtcaatttcgtgccagccaccgcggtcacacgattaacccaagtcaatagaagccggcgtaaagagtgtttt

SEQ ID NO: 80540 - DNA, 120 bp, Homo sapiens
  misc_feature: 505 for SV(C|O) and mtDNA
ttgtgtgttcagatatgttaaagccactttcgtagtctattttgtgtcagctggagttttttacaactcaggtgagttttagctttattggggagggggtgatctaaaacactctttacg

SEQ ID NO: 80541 - DNA, 120 bp, Homo sapiens
  misc_feature: 505 for SV(C|O) and mtDNA
ttctgctagggggtggaagcggatgagtaagaagattcctgctacaactatagtgcttgagtggagtagggctgagactggggtggggccttctatggctgaggggagtcaggggtggag

SEQ ID NO: 80542 - DNA, 120 bp, Homo sapiens
  misc_feature: 505 for SV(C|O) and mtDNA
tcacaggtttctactccaaagaccacatcatcgaaaccgcaaacatatcatacacaaacgcctgagccctatctattactctcatcgctacctccctgacaagcgcctatagcactcgaa

SEQ ID NO: 80543 - DNA, 120 bp, Homo sapiens; identical to SEQ ID NO: 59479
  misc_feature: 505 for SV(C|O) and mtDNA

SEQ ID NO: 80544 - DNA, 120 bp, Homo sapiens
  misc_feature: 505 for SV(C|O) and mtDNA
ttcccgtgggggtgtggctaggctaagcgttttgagctgcattgctgcgtgcttgatgcttgtcccttttgatcgtggtgatttagagggtgaactcactggaacggggatgcttgcatg

SEQ ID NO: 80545 - DNA, 120 bp, Homo sapiens
  misc_feature: 505 for SV(C|O) and mtDNA
ttcaacctgttcctgctccggcctccactatagcagatgcgagcaggagtaggagagagggaggtaagagtcagaagcttatgttgtttatgcggggaaacgccatatcgggggcaccga

SEQ ID NO: 80546 - DNA, 120 bp, Homo sapiens; identical to SEQ ID NO: 58704
  misc_feature: 505 for SV(C|O) and mtDNA

SEQ ID NO: 80547 - DNA, 120 bp, Homo sapiens; identical to SEQ ID NO: 59978
  misc_feature: 505 for SV(C|O) and mtDNA

SEQ ID NO: 80548 - DNA, 120 bp, Homo sapiens; identical to SEQ ID NO: 58234
  misc_feature: 505 for SV(C|O) and mtDNA

SEQ ID NO: 80549 - DNA, 120 bp, Homo sapiens
  misc_feature: 505 for SV(C|O) and mtDNA
gagtgagccccattgtgttgtggtaaatatgtagagggagtatagggctgtgactagtatgttgagtcctgtaagtaggagagtgatatttgatcaggagaacgtggttactagcacaga

SEQ ID NO: 80550 - DNA, 120 bp, Homo sapiens
  misc_feature: 505 for SV(C|O) and mtDNA
tcagccctactccactcaagcactatagttgtagcaggaatcttcttactcatccgcttccaccccctagcagaaaatagcccactaatccaaactctaacactatgcttaggcgctatc

SEQ ID NO: 80551 - DNA, 120 bp, Homo sapiens
  misc_feature: 505 for SV(C|O) and mtDNA
gtaaatatgtagagggagtatagggctgtgactagtatgttgagtcctgtaagtaggagagtgatatttgatcaggagaacgtggttactagcacagagagttctcccagtaggttaata

SEQ ID NO: 80552 - DNA, 120 bp, Homo sapiens
  misc_feature: 505 for SV(C|O) and mtDNA
aggagacacctgctaggtgtaaggagaagatggttaggtctacggaggctccagggtgggagtagttccctgctaagggagggtagactgttcaacctgttcctgctccggcctccacta

SEQ ID NO: 80553 - DNA, 120 bp, Homo sapiens
  misc_feature: 505 for SV(C|O) and mtDNA
cacctagcattcctgcacatctgtacccacgccttcttcaaagccatactatttatgtgctccgggtccatcatccacaaccttaacaatgaacaagatatccgaaaaataggaggacta

SEQ ID NO: 80554 - DNA, 120 bp, Homo sapiens
  misc_feature: 505 for SV(C|O) and mtDNA
tacccccggtcgtgtagcggtgaaagtggtttggtttagacgtccgggaattgcatctgtttttaagcctaatgtggggacagctcatgagtgcaagacgtcttgtgatgtaattattat

SEQ ID NO: 80555 - DNA, 120 bp, Homo sapiens
  misc_feature: 505 for SV(C|O) and mtDNA
taccatcaaatcaattggccaccaatggtactgaacctacgagtacaccgactacggcggactaatcttcaactcctacatacttcccccattattcctagaaccaggcgacctgcgact

SEQ ID NO: 80556 - DNA, 120 bp, Homo sapiens; identical to SEQ ID NO: 62694
  misc_feature: 505 for SV(C|O) and mtDNA

SEQ ID NO: 80557 - DNA, 120 bp, Homo sapiens
  misc_feature: 505 for SV(C|O) and mtDNA
gtgctatagggtaaatacgggccctatttcaaagatttttaggggaattaattctaggacgatgggcatgaaactgtggtttgctccacagatttcagagcattgaccgtagtatacccc

SEQ ID NO: 80558 - DNA, 120 bp, Homo sapiens; identical to SEQ ID NO: 61225
  misc_feature: 505 for SV(C|O) and mtDNA

SEQ ID NO: 80559 - DNA, 120 bp, Homo sapiens
  misc_feature: 505 for SV(C|O) and mtDNA
ggtatgtgctttctcgtgttacatcgcgccatcattggtatatggttagtgtgttggttagtaggcctagtatgaggagcgttatggagtggaagtgaaatcacatggctaggccggagg

SEQ ID NO: 80560 - DNA, 120 bp, Homo sapiens; identical to SEQ ID NO: 56547
  misc_feature: 505 for SV(C|O) and mtDNA

SEQ ID NO: 80561 - DNA, 120 bp, Homo sapiens; identical to SEQ ID NO: 60621
  misc_feature: 505 for SV(C|O) and mtDNA

SEQ ID NO: 80562 - DNA, 120 bp, Homo sapiens
  misc_feature: 505 for SV(C|O) and mtDNA
ggagcaaaccacagtttcatgcccatcgtcctagaattaattcccctaaaaatctttgaaatagggcccgtatttaccctatagcaccccctctaccccctctagagcccactgtaaagc

SEQ ID NO: 80563 - DNA, 120 bp, Homo sapiens
  misc_feature: 505 for SV(C|O) and mtDNA
gctagggggtggaagcggatgagtaagaagattcctgctacaactatagtgcttgagtggagtagggctgagactggggtggggccttctatggctgaggggagtcaggggtggagacct

SEQ ID NO: 80564 - DNA, 120 bp, Homo sapiens
  misc_feature: 505 for SV(C|O) and mtDNA
cccttaccatcaaatcaattggccaccaatggtactgaacctacgagtacaccgactacggcggactaatcttcaactcctacatacttcccccattattcctagaaccaggcgacctgc

SEQ ID NO: 80565 - DNA, 120 bp, Homo sapiens
  misc_feature: 505 for SV(C|O) and mtDNA
cctctccacccttatcacaacacaagaacacctctgattactcctgccatcatgacccttggccataatatgatttatctccacactagcagagaccaaccgaacccccttcgaccttgc

SEQ ID NO: 80566 - DNA, 120 bp, Homo sapiens
  misc_feature: 505 for SV(C|O) and mtDNA
accatcaaatcaattggccaccaatggtactgaacctacgagtacaccgactacggcggactaatcttcaactcctacatacttcccccattattcctagaaccaggcgacctgcgactc

SEQ ID NO: 80567 - DNA, 120 bp, Homo sapiens; identical to SEQ ID NO: 63005
  misc_feature: 505 for SV(C|O) and mtDNA

SEQ ID NO: 80568 - DNA, 120 bp, Homo sapiens
  misc_feature: 505 for SV(C|O) and mtDNA
ctaagctatactaaccccagggttggtcaatttcgtgccagccaccgcggtcacacgattaacccaagtcaatagaagccggcgtaaagagtgttttagatcaccccctccccaataaag

SEQ ID NO: 80569 - DNA, 120 bp, Homo sapiens
  misc_feature: 505 for SV(C|O) and mtDNA
agtgagccccattgtgttgtggtaaatatgtagagggagtatagggctgtgactagtatgttgagtcctgtaagtaggagagtgatatttgatcaggagaacgtggttactagcacagag

SEQ ID NO: 80570 - DNA, 120 bp, Homo sapiens
  misc_feature: 505 for SV(C|O) and mtDNA
cctgcggcgtattcgatgttgaagcctgagactagttcggactctccttcggcaaggtcgaagggggttcggttggtctctgctagtgtggagataaatcatattatggccaagggtcat

SEQ ID NO: 80571 - DNA, 120 bp, Homo sapiens
  misc_feature: 505 for SV(C|O) and mtDNA
cctccaaatcaccacaggactattcctagccatgcactactcaccagacgcctcaaccgccttttcatcaatcgcccacatcactcgagacgtaaattatggctgaatcatccgctacct

SEQ ID NO: 80572 - DNA, 120 bp, Homo sapiens; identical to SEQ ID NO: 62395
  misc_feature: 505 for SV(C|O) and mtDNA

SEQ ID NO: 80573 - DNA, 120 bp, Homo sapiens; identical to SEQ ID NO: 56527
  misc_feature: 505 for SV(C|O) and mtDNA

SEQ ID NO: 80574 - DNA, 120 bp, Homo sapiens
  misc_feature: 505 for SV(C|O) and mtDNA
aggtttctactccaaagaccacatcatcgaaaccgcaaacatatcatacacaaacgcctgagccctatctattactctcatcgctacctccctgacaagcgcctatagcactcgaataat

SEQ ID NO: 80575 - DNA, 120 bp, Homo sapiens; identical to SEQ ID NO: 59865
  misc_feature: 505 for SV(C|O) and mtDNA

SEQ ID NO: 80576 - DNA, 120 bp, Homo sapiens
  misc_feature: 504 for SV(C|O) and mtDNA
aacccccctccccatacccaaccccctggtcaacctcaacctaggcctcctatttattctagccacctctagcctagccgtttactcaatcctctgatcagggtgagcatcaaactcaaa

SEQ ID NO: 80577 - DNA, 120 bp, Homo sapiens
  misc_feature: 504 for SV(C|O) and mtDNA
gagaagaccctatggagctttaatttattaatgcaaacagtacctaacaaacccacaggtcctaaactaccaaacctgcattaaaaatttcggttggggcgacctcggagcagaacccaa

SEQ ID NO: 80578 - DNA, 120 bp, Homo sapiens
  misc_feature: 504 for SV(C|O) and mtDNA
atgctcaccctgatcagaggattgagtaaacggctaggctagaggtggctagaataaataggaggcctaggttgaggttgaccagggggttgggtatggggaggggggttcatagtagaa

SEQ ID NO: 80579 - DNA, 120 bp, Homo sapiens
  misc_feature: 504 for SV(C|O) and mtDNA
ttacaatatgggagattattccgaagcctggtaggataagaatataaacttcagggtgaccgaaaaatcagaataggtgttggtatagaatggggtctcctcctccggcggggtcgaaga

SEQ ID NO: 80580 - DNA, 120 bp, Homo sapiens; identical to SEQ ID NO: 62935
  misc_feature: 504 for SV(C|O) and mtDNA

SEQ ID NO: 80581 - DNA, 120 bp, Homo sapiens
  misc_feature: 504 for SV(C|O) and mtDNA
tggattaaaccaaacccagctacgcaaaatcttagcatactcctcaattacccacataggatgaataatagcagttctaccgtacaaccctaacataaccattcttaatttaactattta

SEQ ID NO: 80582 - DNA, 120 bp, Homo sapiens
  misc_feature: 504 for SV(C|O) and mtDNA
tgctagggggtggaagcggatgagtaagaagattcctgctacaactatagtgcttgagtggagtagggctgagactggggtggggccttctatggctgaggggagtcaggggtggagacc

SEQ ID NO: 80583 - DNA, 120 bp, Homo sapiens
  misc_feature: 504 for SV(C|O) and mtDNA
cgaataattcttctcaccctaacaggtcaacctcgcttccccacccttactaacattaacgaaaataaccccaccctactaaaccccattaaacgcctgacagccggaagcctattcgca

SEQ ID NO: 80584 - DNA, 120 bp, Homo sapiens
  misc_feature: 504 for SV(C|O) and mtDNA
tgatcagggtgagcatcaaactcaaactacgccctgatcggcgcactgcgagcagtagcccaaacaatctcatatgaagtcaccctagccatcattctactatcaacattactaataagt

SEQ ID NO: 80585 - DNA, 120 bp, Homo sapiens; identical to SEQ ID NO: 56973
  misc_feature: 504 for SV(C|O) and mtDNA

SEQ ID NO: 80586 - DNA, 120 bp, Homo sapiens
  misc_feature: 504 for SV(C|O) and mtDNA
gcctgcggcgtattcgatgttgaagcctgagactagttcggactctccttcggcaaggtcgaagggggttcggttggtctctgctagtgtggagataaatcatattatggccaagggtca

SEQ ID NO: 80587 - DNA, 120 bp, Homo sapiens
  misc_feature: 504 for SV(C|O) and mtDNA
acccccatgcctcaggatactcctcaatagccatcgctgtagtatatccaaagacaaccatcattccccctaaataaattaaaaaaactattaaacccatataacctcccccaaaattca

SEQ ID NO: 80588 - DNA, 120 bp, Homo sapiens
  misc_feature: 504 for SV(C|O) and mtDNA
ggagaagccccggcaggtttgaagctgcttcttcgaatttgcaattcaatatgaaaatcacctcggagctggtaaaaagaggcctaacccctgtctttagatttacagtccaatgcttca

SEQ ID NO: 80589 - DNA, 120 bp, Homo sapiens; identical to SEQ ID NO: 60480
  misc_feature: 504 for SV(C|O) and mtDNA

SEQ ID NO: 80590 - DNA, 120 bp, Homo sapiens
  misc_feature: 504 for SV(C|O) and mtDNA
tattctgatttttcggtcaccctgaagtttatattcttatcctaccaggcttcggaataatctcccatattgtaacttactactccggaaaaaaagaaccatttggatacataggtatgg

SEQ ID NO: 80591 - DNA, 120 bp, Homo sapiens
  misc_feature: 504 for SV(C|O) and mtDNA
acaggtttctactccaaagaccacatcatcgaaaccgcaaacatatcatacacaaacgcctgagccctatctattactctcatcgctacctccctgacaagcgcctatagcactcgaata

SEQ ID NO: 80592 - DNA, 120 bp, Homo sapiens
  misc_feature: 504 for SV(C|O) and mtDNA
acccccggtcgtgtagcggtgaaagtggtttggtttagacgtccgggaattgcatctgtttttaagcctaatgtggggacagctcatgagtgcaagacgtcttgtgatgtaattattata

SEQ ID NO: 80593 - DNA, 120 bp, Homo sapiens
  misc_feature: 504 for SV(C|O) and mtDNA
tagcaggcagttgaggtggattaaaccaaacccagctacgcaaaatcttagcatactcctcaattacccacataggatgaataatagcagttctaccgtacaaccctaacataaccattc

SEQ ID NO: 80594 - DNA, 120 bp, Homo sapiens
  misc_feature: 504 for SV(C|O) and mtDNA
gttttttcataggaggtgtatgagttggtcgtagcggaatcgggggtatgctgttcgaattcataagaacagggaggttagaagtagggtcttggtgacaaaatatgttgtgtagagttc

SEQ ID NO: 80595 - DNA, 120 bp, Homo sapiens
  misc_feature: 504 for SV(C|O) and mtDNA
gtggattaaaccaaacccagctacgcaaaatcttagcatactcctcaattacccacataggatgaataatagcagttctaccgtacaaccctaacataaccattcttaatttaactattt

SEQ ID NO: 80596 - DNA, 120 bp, Homo sapiens
  misc_feature: 504 for SV(C|O) and mtDNA
gagaagccccggcaggtttgaagctgcttcttcgaatttgcaattcaatatgaaaatcacctcggagctggtaaaaagaggcctaacccctgtctttagatttacagtccaatgcttcac

SEQ ID NO: 80597 - DNA, 120 bp, Homo sapiens
  misc_feature: 504 for SV(C|O) and mtDNA
gctaaagtgaactgtatccgacatctggttcctacttcagggccataaagcctaaatagcccacacgttccccttaaataagacatcacgatggatcacaggtctatcaccctattaacc

SEQ ID NO: 80598 - DNA, 120 bp, Homo sapiens
  misc_feature: 504 for SV(C|O) and mtDNA
cctccccatacccaaccccctggtcaacctcaacctaggcctcctatttattctagccacctctagcctagccgtttactcaatcctctgatcagggtgagcatcaaactcaaactacgc

SEQ ID NO: 80599 - DNA, 120 bp, Homo sapiens; identical to SEQ ID NO: 59328
  misc_feature: 504 for SV(C|O) and mtDNA

SEQ ID NO: 80600 - DNA, 120 bp, Homo sapiens
  misc_feature: 504 for SV(C|O) and mtDNA
gccaatggtgagggaggttgaagtgagaggtatggttttgagtagtcctcctatttttcggatatcttgttcattgttaaggttgtggatgatggacccggagcacataaatagtatggc

SEQ ID NO: 80601 - DNA, 120 bp, Homo sapiens
  misc_feature: 504 for SV(C|O) and mtDNA
aacaatctcatatgaagtcaccctagccatcattctactatcaacattactaataagtggctcctttaacctctccacccttatcacaacacaagaacacctctgattactcctgccatc

SEQ ID NO: 80602 - DNA, 120 bp, Homo sapiens
  misc_feature: 504 for SV(C|O) and mtDNA
ctagcattcctgcacatctgtacccacgccttcttcaaagccatactatttatgtgctccgggtccatcatccacaaccttaacaatgaacaagatatccgaaaaataggaggactactc

SEQ ID NO: 80603 - DNA, 120 bp, Homo sapiens
  misc_feature: 504 for SV(C|O) and mtDNA
atagggtaaatacgggccctatttcaaagatttttaggggaattaattctaggacgatgggcatgaaactgtggtttgctccacagatttcagagcattgaccgtagtatacccccggtc

SEQ ID NO: 80604 - DNA, 120 bp, Homo sapiens
  misc_feature: 504 for SV(C|O) and mtDNA
ctgacaagcgcctatagcactcgaataattcttctcaccctaacaggtcaacctcgcttccccacccttactaacattaacgaaaataaccccaccctactaaaccccattaaacgcctg

SEQ ID NO: 80605 - DNA, 120 bp, Homo sapiens
  misc_feature: 504 for SV(C|O) and mtDNA
ctccaaatcaccacaggactattcctagccatgcactactcaccagacgcctcaaccgccttttcatcaatcgcccacatcactcgagacgtaaattatggctgaatcatccgctacctt

SEQ ID NO: 80606 - DNA, 120 bp, Homo sapiens
  misc_feature: 504 for SV(C|O) and mtDNA
acaaaatatgttgtgtagagttcaggggagagtgcgtcatatgttgttcctaggaagattgtagtggtgagggtgtttattataataatgtttgtgtattcggctatgaagaataaggcg

SEQ ID NO: 80607 - DNA, 120 bp, Homo sapiens
  misc_feature: 504 for SV(C|O) and mtDNA
ccccatacccaaccccctggtcaacctcaacctaggcctcctatttattctagccacctctagcctagccgtttactcaatcctctgatcagggtgagcatcaaactcaaactacgccct

SEQ ID NO: 80608 - DNA, 120 bp, Homo sapiens
  misc_feature: 504 for SV(C|O) and mtDNA
cacaccccccagacgaaaataccaaatgcatggagagctcccgtgagtggttaatagggtgatagacctgtgatccatcgtgatgtcttatttaaggggaacgtgtgggctatttaggct

SEQ ID NO: 80609 - DNA, 120 bp, Homo sapiens
  misc_feature: 504 for SV(C|O) and mtDNA
agaagccccggcaggtttgaagctgcttcttcgaatttgcaattcaatatgaaaatcacctcggagctggtaaaaagaggcctaacccctgtctttagatttacagtccaatgcttcact

SEQ ID NO: 80610 - DNA, 120 bp, Homo sapiens
  misc_feature: 504 for SV(C|O) and mtDNA
aatcacctcccattccgataaaatcaccttccacccttactacacaatcaaagacgccctcggcttacttctcttccttctctccttaatgacattaacactattctcaccagacctcct

SEQ ID NO: 80611 - DNA, 120 bp, Homo sapiens
  misc_feature: 503 for SV(C|O) and mtDNA
tttcaaagatttttaggggaattaattctaggacgatgggcatgaaactgtggtttgctccacagatttcagagcattgaccgtagtatacccccggtcgtgtagcggtgaaagtggttt

SEQ ID NO: 80612 - DNA, 120 bp, Homo sapiens
  misc_feature: 503 for SV(C|O) and mtDNA
ctcaatcttatccatcatagcaggcagttgaggtggattaaaccaaacccagctacgcaaaatcttagcatactcctcaattacccacataggatgaataatagcagttctaccgtacaa

SEQ ID NO: 80613 - DNA, 120 bp, Homo sapiens
  misc_feature: 503 for SV(C|O) and mtDNA
ttgatgctcaccctgatcagaggattgagtaaacggctaggctagaggtggctagaataaataggaggcctaggttgaggttgaccagggggttgggtatggggaggggggttcatagta

SEQ ID NO: 80614 - DNA, 120 bp, Homo sapiens; identical to SEQ ID NO: 57919
  misc_feature: 503 for SV(C|O) and mtDNA

SEQ ID NO: 80615 - DNA, 120 bp, Homo sapiens; identical to SEQ ID NO: 60155
  misc_feature: 503 for SV(C|O) and mtDNA

SEQ ID NO: 80616 - DNA, 120 bp, Homo sapiens
  misc_feature: 503 for SV(C|O) and mtDNA
tgggtttgttaggtactgtttgcattaataaattaaagctccatagggtcttctcgtcttgctgtgtcatgcccgcctcttcacgggcaggtcaatttcactggttaaaagtaagagaca

SEQ ID NO: 80617 - DNA, 120 bp, Homo sapiens
  misc_feature: 503 for SV(C|O) and mtDNA
tgtatgagttggtcgtagcggaatcgggggtatgctgttcgaattcataagaacagggaggttagaagtagggtcttggtgacaaaatatgttgtgtagagttcaggggagagtgcgtca

SEQ ID NO: 80618 - DNA, 120 bp, Homo sapiens
  misc_feature: 503 for SV(C|O) and mtDNA
tgaaggtagcggatgattcagccataatttacgtctcgagtgatgtgggcgattgatgaaaaggcggttgaggcgtctggtgagtagtgcatggctaggaatagtcctgtggtgatttgg

SEQ ID NO: 80619 - DNA, 120 bp, Homo sapiens
  misc_feature: 503 for SV(C|O) and mtDNA
ccatacccaaccccctggtcaacctcaacctaggcctcctatttattctagccacctctagcctagccgtttactcaatcctctgatcagggtgagcatcaaactcaaactacgccctga

SEQ ID NO: 80620 - DNA, 120 bp, Homo sapiens
  misc_feature: 503 for SV(C|O) and mtDNA
cgcggtcacacgattaacccaagtcaatagaagccggcgtaaagagtgttttagatcaccccctccccaataaagctaaaactcacctgagttgtaaaaaactccagctgacacaaaata

SEQ ID NO: 80621 - DNA, 120 bp, Homo sapiens; identical to SEQ ID NO: 58595
  misc_feature: 503 for SV(C|O) and mtDNA

SEQ ID NO: 80622 - DNA, 120 bp, Homo sapiens
  misc_feature: 503 for SV(C|O) and mtDNA
attgctaaaggttaatcactgctgtttcccgtgggggtgtggctaggctaagcgttttgagctgcattgctgcgtgcttgatgcttgtcccttttgatcgtggtgatttagagggtgaac

SEQ ID NO: 80623 - DNA, 120 bp, Homo sapiens
  misc_feature: 503 for SV(C|O) and mtDNA
gttacaatatgggagattattccgaagcctggtaggataagaatataaacttcagggtgaccgaaaaatcagaataggtgttggtatagaatggggtctcctcctccggcggggtcgaag

SEQ ID NO: 80624 - DNA, 120 bp, Homo sapiens; identical to SEQ ID NO: 62911
  misc_feature: 503 for SV(C|O) and mtDNA

SEQ ID NO: 80625 - DNA, 120 bp, Homo sapiens; identical to SEQ ID NO: 62901
  misc_feature: 503 for SV(C|O) and mtDNA

SEQ ID NO: 80626 - DNA, 120 bp, Homo sapiens
  misc_feature: 503 for SV(C|O) and mtDNA
ggtagactgttcaacctgttcctgctccggcctccactatagcagatgcgagcaggagtaggagagagggaggtaagagtcagaagcttatgttgtttatgcggggaaacgccatatcgg

SEQ ID NO: 80627 - DNA, 120 bp, Homo sapiens
  misc_feature: 503 for SV(C|O) and mtDNA
cttcaaactctactcccactaatagctttttgatgacttctagcaagcctcgctaacctcgccttaccccccactattaacctactgggagaactctctgtgctagtaaccacgttctcc

SEQ ID NO: 80628 - DNA, 120 bp, Homo sapiens
  misc_feature: 503 for SV(C|O) and mtDNA
gcgccattggcgtgaaggtagcggatgattcagccataatttacgtctcgagtgatgtgggcgattgatgaaaaggcggttgaggcgtctggtgagtagtgcatggctaggaatagtcct

SEQ ID NO: 80629 - DNA, 120 bp, Homo sapiens; identical to SEQ ID NO: 61308
  misc_feature: 503 for SV(C|O) and mtDNA

SEQ ID NO: 80630 - DNA, 120 bp, Homo sapiens; identical to SEQ ID NO: 62732
  misc_feature: 503 for SV(C|O) and mtDNA

SEQ ID NO: 80631 - DNA, 120 bp, Homo sapiens
  misc_feature: 503 for SV(C|O) and mtDNA
gaagccccggcaggtttgaagctgcttcttcgaatttgcaattcaatatgaaaatcacctcggagctggtaaaaagaggcctaacccctgtctttagatttacagtccaatgcttcactc

SEQ ID NO: 80632 - DNA, 120 bp, Homo sapiens; identical to SEQ ID NO: 61631
  misc_feature: 503 for SV(C|O) and mtDNA

SEQ ID NO: 80633 - DNA, 120 bp, Homo sapiens; identical to SEQ ID NO: 58969
  misc_feature: 503 for SV(C|O) and mtDNA

SEQ ID NO: 80634 - DNA, 120 bp, Homo sapiens
  misc_feature: 503 for SV(C|O) and mtDNA
gagatatttggaggtggggatcaatagagggggaaatagaatgatcagtactgcggcgggtaggcctaggattgtgggggcaatgaatgaagcgaacagattttcgttcattttggttct

SEQ ID NO: 80635 - DNA, 120 bp, Homo sapiens; identical to SEQ ID NO: 57878
  misc_feature: 503 for SV(C|O) and mtDNA

SEQ ID NO: 80636 - DNA, 120 bp, Homo sapiens
  misc_feature: 503 for SV(C|O) and mtDNA
ctttagcaataaacgaaagtttaactaagctatactaaccccagggttggtcaatttcgtgccagccaccgcggtcacacgattaacccaagtcaatagaagccggcgtaaagagtgttt

SEQ ID NO: 80637 - DNA, 120 bp, Homo sapiens; identical to SEQ ID NO: 60988
  misc_feature: 503 for SV(C|O) and mtDNA

SEQ ID NO: 80638 - DNA, 120 bp, Homo sapiens; identical to SEQ ID NO: 59150
  misc_feature: 503 for SV(C|O) and mtDNA

SEQ ID NO: 80639 - DNA, 120 bp, Homo sapiens
  misc_feature: 503 for SV(C|O) and mtDNA
cgtcttgtgatgtaattattatacgaatgggggcttcaatcgggagtactactcgattgtcaacgtcaaggagtcgcaggtcgcctggttctaggaataatgggggaagtatgtaggagt

SEQ ID NO: 80640 - DNA, 120 bp, Homo sapiens
  misc_feature: 503 for SV(C|O) and mtDNA
ccccggtcgtgtagcggtgaaagtggtttggtttagacgtccgggaattgcatctgtttttaagcctaatgtggggacagctcatgagtgcaagacgtcttgtgatgtaattattatacg

SEQ ID NO: 80641 - DNA, 120 bp, Homo sapiens
  misc_feature: 503 for SV(C|O) and mtDNA
cggcgtattcgatgttgaagcctgagactagttcggactctccttcggcaaggtcgaagggggttcggttggtctctgctagtgtggagataaatcatattatggccaagggtcatgatg

SEQ ID NO: 80642 - DNA, 120 bp, Homo sapiens
  misc_feature: 503 for SV(C|O) and mtDNA
ccgcacaagagtgctactctcctcgctccgggcccataacacttgggggtagctaaagtgaactgtatccgacatctggttcctacttcagggccataaagcctaaatagcccacacgtt

SEQ ID NO: 80643 - DNA, 120 bp, Homo sapiens
  misc_feature: 503 for SV(C|O) and mtDNA
ccccccagacgaaaataccaaatgcatggagagctcccgtgagtggttaatagggtgatagacctgtgatccatcgtgatgtcttatttaaggggaacgtgtgggctatttaggctttat

SEQ ID NO: 80644 - DNA, 120 bp, Homo sapiens; identical to SEQ ID NO: 62316
  misc_feature: 503 for SV(C|O) and mtDNA

SEQ ID NO: 80645 - DNA, 120 bp, Homo sapiens
  misc_feature: 503 for SV(C|O) and mtDNA
cactgctgtttcccgtgggggtgtggctaggctaagcgttttgagctgcattgctgcgtgcttgatgcttgtcccttttgatcgtggtgatttagagggtgaactcactggaacggggat

SEQ ID NO: 80646 - DNA, 120 bp, Homo sapiens
  misc_feature: 503 for SV(C|O) and mtDNA
caccccccagacgaaaataccaaatgcatggagagctcccgtgagtggttaatagggtgatagacctgtgatccatcgtgatgtcttatttaaggggaacgtgtgggctatttaggcttt

SEQ ID NO: 80647 - DNA, 120 bp, Homo sapiens
  misc_feature: 503 for SV(C|O) and mtDNA
caaacaaccccctaggaatcacctcccattccgataaaatcaccttccacccttactacacaatcaaagacgccctcggcttacttctcttccttctctccttaatgacattaacactat

SEQ ID NO: 80648 - DNA, 120 bp, Homo sapiens; identical to SEQ ID NO: 63012
  misc_feature: 503 for SV(C|O) and mtDNA

SEQ ID NO: 80649 - DNA, 120 bp, Homo sapiens; identical to SEQ ID NO: 61446
  misc_feature: 503 for SV(C|O) and mtDNA

SEQ ID NO: 80650 - DNA, 120 bp, Homo sapiens
  misc_feature: 503 for SV(C|O) and mtDNA
aaacaaccccctaggaatcacctcccattccgataaaatcaccttccacccttactacacaatcaaagacgccctcggcttacttctcttccttctctccttaatgacattaacactatt

SEQ ID NO: 80651 - DNA, 120 bp, Homo sapiens
  misc_feature: 502 for SV(C|O) and mtDNA
ttggcgtgaaggtagcggatgattcagccataatttacgtctcgagtgatgtgggcgattgatgaaaaggcggttgaggcgtctggtgagtagtgcatggctaggaatagtcctgtggtg

SEQ ID NO: 80652 - DNA, 120 bp, Homo sapiens
  misc_feature: 502 for SV(C|O) and mtDNA
ttcaaagatttttaggggaattaattctaggacgatgggcatgaaactgtggtttgctccacagatttcagagcattgaccgtagtatacccccggtcgtgtagcggtgaaagtggtttg

SEQ ID NO: 80653 - DNA, 120 bp, Homo sapiens
  misc_feature: 502 for SV(C|O) and mtDNA
tgctatagggtaaatacgggccctatttcaaagatttttaggggaattaattctaggacgatgggcatgaaactgtggtttgctccacagatttcagagcattgaccgtagtataccccc

SEQ ID NO: 80654 - DNA, 120 bp, Homo sapiens
  misc_feature: 502 for SV(C|O) and mtDNA
tgcgcccttacacaaaatgacatcaaaaaaatcgtagccttctccacttcaagtcaactaggactcataatagttacaatcggcatcaaccaaccacacctagcattcctgcacatctgt

SEQ ID NO: 80655 - DNA, 120 bp, Homo sapiens
  misc_feature: 502 for SV(C|O) and mtDNA
gtttcccgtgggggtgtggctaggctaagcgttttgagctgcattgctgcgtgcttgatgcttgtcccttttgatcgtggtgatttagagggtgaactcactggaacggggatgcttgca

SEQ ID NO: 80656 - DNA, 120 bp, Homo sapiens
  misc_feature: 502 for SV(C|O) and mtDNA
gctaaaggttaatcactgctgtttcccgtgggggtgtggctaggctaagcgttttgagctgcattgctgcgtgcttgatgcttgtcccttttgatcgtggtgatttagagggtgaactca

SEQ ID NO: 80657 - DNA, 120 bp, Homo sapiens
  misc_feature: 502 for SV(C|O) and mtDNA
tgagtgagccccattgtgttgtggtaaatatgtagagggagtatagggctgtgactagtatgttgagtcctgtaagtaggagagtgatatttgatcaggagaacgtggttactagcacag

SEQ ID NO: 80658 - DNA, 120 bp, Homo sapiens
  misc_feature: 502 for SV(C|O) and mtDNA
gatgctcaccctgatcagaggattgagtaaacggctaggctagaggtggctagaataaataggaggcctaggttgaggttgaccagggggttgggtatggggaggggggttcatagtaga

SEQ ID NO: 80659 - DNA, 120 bp, Homo sapiens
  misc_feature: 502 for SV(C|O) and mtDNA
tcatcgctacctccctgacaagcgcctatagcactcgaataattcttctcaccctaacaggtcaacctcgcttccccacccttactaacattaacgaaaataaccccaccctactaaacc

SEQ ID NO: 80660 - DNA, 120 bp, Homo sapiens
  misc_feature: 502 for SV(C|O) and mtDNA
tatttcaaagatttttaggggaattaattctaggacgatgggcatgaaactgtggtttgctccacagatttcagagcattgaccgtagtatacccccggtcgtgtagcggtgaaagtggt

SEQ ID NO: 80661 - DNA, 120 bp, Homo sapiens
  misc_feature: 502 for SV(C|O) and mtDNA
tatgaacccccctccccatacccaaccccctggtcaacctcaacctaggcctcctatttattctagccacctctagcctagccgtttactcaatcctctgatcagggtgagcatcaaact

SEQ ID NO: 80662 - DNA, 120 bp, Homo sapiens
  misc_feature: 502 for SV(C|O) and mtDNA
tagctcttagtaagattacacatgcaagcatccccgttccagtgagttcaccctctaaatcaccacgatcaaaagggacaagcatcaagcacgcagcaatgcagctcaaaacgcttagcc

SEQ ID NO: 80663 - DNA, 120 bp, Homo sapiens
  misc_feature: 502 for SV(C|O) and mtDNA
tagcaataaacgaaagtttaactaagctatactaaccccagggttggtcaatttcgtgccagccaccgcggtcacacgattaacccaagtcaatagaagccggcgtaaagagtgttttag

SEQ ID NO: 80664 - DNA, 120 bp, Homo sapiens
  misc_feature: 502 for SV(C|O) and mtDNA
ggtgctatagggtaaatacgggccctatttcaaagatttttaggggaattaattctaggacgatgggcatgaaactgtggtttgctccacagatttcagagcattgaccgtagtataccc

SEQ ID NO: 80665 - DNA, 120 bp, Homo sapiens; identical to SEQ ID NO: 62777
  misc_feature: 502 for SV(C|O) and mtDNA

SEQ ID NO: 80666 - DNA, 120 bp, Homo sapiens
  misc_feature: 502 for SV(C|O) and mtDNA
ggctcgtaagaaggcctagataggggattgtgcggtgtgtgatggtagggtagaatccgagtatgttggagaaataaaatgtgcatagtggggattttattttaagtttgttggttaggt

SEQ ID NO: 80667 - DNA, 120 bp, Homo sapiens; identical to SEQ ID NO: 63007
  misc_feature: 502 for SV(C|O) and mtDNA

SEQ ID NO: 80668 - DNA, 120 bp, Homo sapiens
  misc_feature: 502 for SV(C|O) and mtDNA
gatcagggtgagcatcaaactcaaactacgccctgatcggcgcactgcgagcagtagcccaaacaatctcatatgaagtcaccctagccatcattctactatcaacattactaataagtg

SEQ ID NO: 80669 - DNA, 120 bp, Homo sapiens
  misc_feature: 502 for SV(C|O) and mtDNA
cgcacaagagtgctactctcctcgctccgggcccataacacttgggggtagctaaagtgaactgtatccgacatctggttcctacttcagggccataaagcctaaatagcccacacgttc

SEQ ID NO: 80670 - DNA, 120 bp, Homo sapiens
  misc_feature: 502 for SV(C|O) and mtDNA
cttccggctgtcaggcgtttaatggggtttagtagggtggggttattttcgttaatgttagtaagggtggggaagcgaggttgacctgttagggtgagaagaattattcgagtgctatag

SEQ ID NO: 80671 - DNA, 120 bp, Homo sapiens; identical to SEQ ID NO: 56879
  misc_feature: 502 for SV(C|O) and mtDNA

SEQ ID NO: 80672 - DNA, 120 bp, Homo sapiens
  misc_feature: 502 for SV(C|O) and mtDNA
aataattcttctcaccctaacaggtcaacctcgcttccccacccttactaacattaacgaaaataaccccaccctactaaaccccattaaacgcctgacagccggaagcctattcgcagg

SEQ ID NO: 80673 - DNA, 120 bp, Homo sapiens
  misc_feature: 502 for SV(C|O) and mtDNA
aggggaactagtcagttgccaaagcctccgattatgatgggtattactatgaagaagattattacaaatgcatgggctgtgacgataacgttgtagatgtggtcgttacctagaaggttg

SEQ ID NO: 80674 - DNA, 120 bp, Homo sapiens; identical to SEQ ID NO: 57026
  misc_feature: 502 for SV(C|O) and mtDNA

SEQ ID NO: 80675 - DNA, 120 bp, Homo sapiens
  misc_feature: 502 for SV(C|O) and mtDNA
acaccccccagacgaaaataccaaatgcatggagagctcccgtgagtggttaatagggtgatagacctgtgatccatcgtgatgtcttatttaaggggaacgtgtgggctatttaggctt

SEQ ID NO: 80676 - DNA, 120 bp, Homo sapiens
  misc_feature: 501 for SV(C|O) and mtDNA
ttttcataggaggtgtatgagttggtcgtagcggaatcgggggtatgctgttcgaattcataagaacagggaggttagaagtagggtcttggtgacaaaatatgttgtgtagagttcagg

SEQ ID NO: 80677 - DNA, 120 bp, Homo sapiens; identical to SEQ ID NO: 62939
  misc_feature: 501 for SV(C|O) and mtDNA

SEQ ID NO: 80678 - DNA, 120 bp, Homo sapiens; identical to SEQ ID NO: 60206
  misc_feature: 501 for SV(C|O) and mtDNA

SEQ ID NO: 80679 - DNA, 120 bp, Homo sapiens
  misc_feature: 501 for SV(C|O) and mtDNA
ccaccgcggtcacacgattaacccaagtcaatagaagccggcgtaaagagtgttttagatcaccccctccccaataaagctaaaactcacctgagttgtaaaaaactccagctgacacaa

SEQ ID NO: 80680 - DNA, 120 bp, Homo sapiens; identical to SEQ ID NO: 58646
  misc_feature: 501 for SV(C|O) and mtDNA

SEQ ID NO: 80681 - DNA, 120 bp, Homo sapiens
  misc_feature: 501 for SV(C|O) and mtDNA
ttagggtgagaagaattattcgagtgctataggcgcttgtcagggaggtagcgatgagagtaatagatagggctcaggcgtttgtgtatgatatgtttgcggtttcgatgatgtggtctt

SEQ ID NO: 80682 - DNA, 120 bp, Homo sapiens
  misc_feature: 501 for SV(C|O) and mtDNA
tgtggagcaaaccacagtttcatgcccatcgtcctagaattaattcccctaaaaatctttgaaatagggcccgtatttaccctatagcaccccctctaccccctctagagcccactgtaa

SEQ ID NO: 80683 - DNA, 120 bp, Homo sapiens
  misc_feature: 501 for SV(C|O) and mtDNA
tgtgtgttcagatatgttaaagccactttcgtagtctattttgtgtcagctggagttttttacaactcaggtgagttttagctttattggggagggggtgatctaaaacactctttacgc

SEQ ID NO: 80684 - DNA, 120 bp, Homo sapiens
  misc_feature: 501 for SV(C|O) and mtDNA
tgtcactttcctaggacttctaacagccctagacctcaactacctaaccaacaaacttaaaataaaatccccactatgcacattttatttctccaacatactcggattctaccctaccat

SEQ ID NO: 80685 - DNA, 120 bp, Homo sapiens
  misc_feature: 501 for SV(C|O) and mtDNA
ctccggcctagccatgtgatttcacttccactccataacgctcctcatactaggcctactaaccaacacactaaccatataccaatgatggcgcgatgtaacacgagaaagcacatacca

SEQ ID NO: 80686 - DNA, 120 bp, Homo sapiens
  misc_feature: 501 for SV(C|O) and mtDNA
tagcattcctgcacatctgtacccacgccttcttcaaagccatactatttatgtgctccgggtccatcatccacaaccttaacaatgaacaagatatccgaaaaataggaggactactca

SEQ ID NO: 80687 - DNA, 120 bp, Homo sapiens
  misc_feature: 501 for SV(C|O) and mtDNA
tcttgtgatgtaattattatacgaatgggggcttcaatcgggagtactactcgattgtcaacgtcaaggagtcgcaggtcgcctggttctaggaataatgggggaagtatgtaggagttg

SEQ ID NO: 80688 - DNA, 120 bp, Homo sapiens
  misc_feature: 501 for SV(C|O) and mtDNA
ataattcttctcaccctaacaggtcaacctcgcttccccacccttactaacattaacgaaaataaccccaccctactaaaccccattaaacgcctgacagccggaagcctattcgcagga

SEQ ID NO: 80689 - DNA, 120 bp, Homo sapiens; identical to SEQ ID NO: 61324
  misc_feature: 501 for SV(C|O) and mtDNA

SEQ ID NO: 80690 - DNA, 120 bp, Homo sapiens
  misc_feature: 501 for SV(C|O) and mtDNA
taggaggtgtatgagttggtcgtagcggaatcgggggtatgctgttcgaattcataagaacagggaggttagaagtagggtcttggtgacaaaatatgttgtgtagagttcaggggagag

SEQ ID NO: 80691 - DNA, 120 bp, Homo sapiens
  misc_feature: 501 for SV(C|O) and mtDNA
ctcatcgctacctccctgacaagcgcctatagcactcgaataattcttctcaccctaacaggtcaacctcgcttccccacccttactaacattaacgaaaataaccccaccctactaaac

SEQ ID NO: 80692 - DNA, 120 bp, Homo sapiens; identical to SEQ ID NO: 58989
  misc_feature: 501 for SV(C|O) and mtDNA

SEQ ID NO: 80693 - DNA, 120 bp, Homo sapiens; identical to SEQ ID NO: 61385
  misc_feature: 501 for SV(C|O) and mtDNA

SEQ ID NO: 80694 - DNA, 120 bp, Homo sapiens
  misc_feature: 501 for SV(C|O) and mtDNA
gcttaccgaacgaaaaattctaggctatatacaactacgcaaaggccccaacgttgtaggcccctacgggctactacaacccttcgctgacgccataaaactcttcaccaaagagcccct

SEQ ID NO: 80695 - DNA, 120 bp, Homo sapiens; identical to SEQ ID NO: 58297
  misc_feature: 501 for SV(C|O) and mtDNA

SEQ ID NO: 80696 - DNA, 120 bp, Homo sapiens
  misc_feature: 501 for SV(C|O) and mtDNA
cttcgaccttgccgaaggagagtccgaactagtctcaggcttcaacatcgaatacgccgcaggccccttcgccttattcttcatagccgaatacacaaacattattataataaacaccct

SEQ ID NO: 80697 - DNA, 120 bp, Homo sapiens
  misc_feature: 501 for SV(C|O) and mtDNA
cctgacaagcgcctatagcactcgaataattcttctcaccctaacaggtcaacctcgcttccccacccttactaacattaacgaaaataaccccaccctactaaaccccattaaacgcct

SEQ ID NO: 80698 - DNA, 120 bp, Homo sapiens; identical to SEQ ID NO: 52415
  misc_feature: 501 for SV(C|O) and mtDNA

SEQ ID NO: 80699 - DNA, 120 bp, Homo sapiens
  misc_feature: 501 for SV(C|O) and mtDNA
acctctccacccttatcacaacacaagaacacctctgattactcctgccatcatgacccttggccataatatgatttatctccacactagcagagaccaaccgaacccccttcgaccttg

SEQ ID NO: 80700 - DNA, 120 bp, Homo sapiens; identical to SEQ ID NO: 58434
  misc_feature: 501 for SV(C|O) and mtDNA

SEQ ID NO: 80701 - DNA, 120 bp, Homo sapiens; identical to SEQ ID NO: 60470
  misc_feature: 501 for SV(C|O) and mtDNA

SEQ ID NO: 80702 - DNA, 120 bp, Homo sapiens
  misc_feature: 500 for SV(C|O) and mtDNA
accctgagaaccaaaatgaacgaaaatctgttcgcttcattcattgcccccacaatcctaggcctacccgccgcagtactgatcattctatttccccctctattgatccccacctccaaa

SEQ ID NO: 80703 - DNA, 120 bp, Homo sapiens
  misc_feature: 500 for SV(C|O) and mtDNA
tttcataggaggtgtatgagttggtcgtagcggaatcgggggtatgctgttcgaattcataagaacagggaggttagaagtagggtcttggtgacaaaatatgttgtgtagagttcaggg

SEQ ID NO: 80704 - DNA, 120 bp, Homo sapiens
  misc_feature: 500 for SV(C|O) and mtDNA
ttagctcttagtaagattacacatgcaagcatccccgttccagtgagttcaccctctaaatcaccacgatcaaaagggacaagcatcaagcacgcagcaatgcagctcaaaacgcttagc

SEQ ID NO: 80705 - DNA, 120 bp, Homo sapiens; identical to SEQ ID NO: 61625
  misc_feature: 500 for SV(C|O) and mtDNA

SEQ ID NO: 80706 - DNA, 120 bp, Homo sapiens; identical to SEQ ID NO: 57270
  misc_feature: 500 for SV(C|O) and mtDNA

SEQ ID NO: 80707 - DNA, 120 bp, Homo sapiens; identical to SEQ ID NO: 61322
  misc_feature: 500 for SV(C|O) and mtDNA

SEQ ID NO: 80708 - DNA, 120 bp, Homo sapiens
  misc_feature: 500 for SV(C|O) and mtDNA
tctactccaaagaccacatcatcgaaaccgcaaacatatcatacacaaacgcctgagccctatctattactctcatcgctacctccctgacaagcgcctatagcactcgaataattcttc

SEQ ID NO: 80709 - DNA, 120 bp, Homo sapiens
  misc_feature: 500 for SV(C|O) and mtDNA
gaggtggattaaaccaaacccagctacgcaaaatcttagcatactcctcaattacccacataggatgaataatagcagttctaccgtacaaccctaacataaccattcttaatttaacta

SEQ ID NO: 80710 - DNA, 120 bp, Homo sapiens
  misc_feature: 500 for SV(C|O) and mtDNA
cccccgctaaccggctttttgcccaaatgggccattatcgaagaattcacaaaaaacaatagcctcatcatccccaccatcatagccaccatcaccctccttaacctctacttctaccta

SEQ ID NO: 80711 - DNA, 120 bp, Homo sapiens
  misc_feature: 500 for SV(C|O) and mtDNA
atgctctgaaatctgtggagcaaaccacagtttcatgcccatcgtcctagaattaattcccctaaaaatctttgaaatagggcccgtatttaccctatagcaccccctctaccccctcta

SEQ ID NO: 80712 - DNA, 120 bp, Homo sapiens; identical to SEQ ID NO: 56841
  misc_feature: 500 for SV(C|O) and mtDNA

SEQ ID NO: 80713 - DNA, 120 bp, Homo sapiens
  misc_feature: 500 for SV(C|O) and mtDNA
ctgctagggggtggaagcggatgagtaagaagattcctgctacaactatagtgcttgagtggagtagggctgagactggggtggggccttctatggctgaggggagtcaggggtggagac

SEQ ID NO: 80714 - DNA, 120 bp, Homo sapiens
  misc_feature: 500 for SV(C|O) and mtDNA
ccttcgaccttgccgaaggagagtccgaactagtctcaggcttcaacatcgaatacgccgcaggccccttcgccttattcttcatagccgaatacacaaacattattataataaacaccc

SEQ ID NO: 80715 - DNA, 120 bp, Homo sapiens; identical to SEQ ID NO: 62929
  misc_feature: 500 for SV(C|O) and mtDNA

SEQ ID NO: 80716 - DNA, 120 bp, Homo sapiens
  misc_feature: 500 for SV(C|O) and mtDNA
ccctgacaagcgcctatagcactcgaataattcttctcaccctaacaggtcaacctcgcttccccacccttactaacattaacgaaaataaccccaccctactaaaccccattaaacgcc

SEQ ID NO: 80717 - DNA, 120 bp, Homo sapiens
  misc_feature: 500 for SV(C|O) and mtDNA
ccagacgaaaataccaaatgcatggagagctcccgtgagtggttaatagggtgatagacctgtgatccatcgtgatgtcttatttaaggggaacgtgtgggctatttaggctttatggcc

SEQ ID NO: 80718 - DNA, 120 bp, Homo sapiens
  misc_feature: 500 for SV(C|O) and mtDNA
caaaccctgagaaccaaaatgaacgaaaatctgttcgcttcattcattgcccccacaatcctaggcctacccgccgcagtactgatcattctatttccccctctattgatccccacctcc

SEQ ID NO: 80719 - DNA, 120 bp, Homo sapiens
  misc_feature: 500 for SV(C|O) and mtDNA
gaatcacctcccattccgataaaatcaccttccacccttactacacaatcaaagacgccctcggcttacttctcttccttctctccttaatgacattaacactattctcaccagacctcc

SEQ ID NO: 80720 - DNA, 120 bp, Homo sapiens
  misc_feature: 500 for SV(C|O) and mtDNA
gcacaagagtgctactctcctcgctccgggcccataacacttgggggtagctaaagtgaactgtatccgacatctggttcctacttcagggccataaagcctaaatagcccacacgttcc

SEQ ID NO: 80721 - DNA, 120 bp, Homo sapiens
  misc_feature: 500 for SV(C|O) and mtDNA
cccaaccccctggtcaacctcaacctaggcctcctatttattctagccacctctagcctagccgtttactcaatcctctgatcagggtgagcatcaaactcaaactacgccctgatcggc

SEQ ID NO: 80722 - DNA, 120 bp, Homo sapiens
  misc_feature: 500 for SV(C|O) and mtDNA
gcaggcagttgaggtggattaaaccaaacccagctacgcaaaatcttagcatactcctcaattacccacataggatgaataatagcagttctaccgtacaaccctaacataaccattctt

SEQ ID NO: 80723 - DNA, 120 bp, Homo sapiens; identical to SEQ ID NO: 59466
  misc_feature: 500 for SV(C|O) and mtDNA

SEQ ID NO: 80724 - DNA, 120 bp, Homo sapiens; identical to SEQ ID NO: 62728
  misc_feature: 500 for SV(C|O) and mtDNA

SEQ ID NO: 80725 - DNA, 120 bp, Homo sapiens
  misc_feature: 500 for SV(C|O) and mtDNA
gaggagacacctgctaggtgtaaggagaagatggttaggtctacggaggctccagggtgggagtagttccctgctaagggagggtagactgttcaacctgttcctgctccggcctccact

SEQ ID NO: 80726 - DNA, 120 bp, Homo sapiens
  misc_feature: 500 for SV(C|O) and mtDNA
acaatatgggagattattccgaagcctggtaggataagaatataaacttcagggtgaccgaaaaatcagaataggtgttggtatagaatggggtctcctcctccggcggggtcgaagaag

SEQ ID NO: 80727 - DNA, 120 bp, Homo sapiens
  misc_feature: 500 for SV(C|O) and mtDNA
ctgcggcgtattcgatgttgaagcctgagactagttcggactctccttcggcaaggtcgaagggggttcggttggtctctgctagtgtggagataaatcatattatggccaagggtcatg

SEQ ID NO: 80728 - DNA, 120 bp, Homo sapiens
  misc_feature: 500 for SV(C|O) and mtDNA
cgtggttactagcacagagagttctcccagtaggttaatagtggggggtaaggcgaggttagcgaggcttgctagaagtcatcaaaaagctattagtgggagtagagtttgaagtccttg

SEQ ID NO: 80729 - DNA, 120 bp, Homo sapiens; identical to SEQ ID NO: 60423
  misc_feature: 500 for SV(C|O) and mtDNA

SEQ ID NO: 80730 - DNA, 120 bp, Homo sapiens
  misc_feature: 500 for SV(C|O) and mtDNA
actgctgtttcccgtgggggtgtggctaggctaagcgttttgagctgcattgctgcgtgcttgatgcttgtcccttttgatcgtggtgatttagagggtgaactcactggaacggggatg

SEQ ID NO: 80731 - DNA, 120 bp, Homo sapiens
  misc_feature: 500 for SV(C|O) and mtDNA
caatctcatatgaagtcaccctagccatcattctactatcaacattactaataagtggctcctttaacctctccacccttatcacaacacaagaacacctctgattactcctgccatcat

SEQ ID NO: 80732 - DNA, 120 bp, Homo sapiens
  misc_feature: 500 for SV(C|O) and mtDNA
attggcgtgaaggtagcggatgattcagccataatttacgtctcgagtgatgtgggcgattgatgaaaaggcggttgaggcgtctggtgagtagtgcatggctaggaatagtcctgtggt

SEQ ID NO: 80733 - DNA, 120 bp, Homo sapiens; identical to SEQ ID NO: 57556
  misc_feature: 500 for SV(C|O) and mtDNA

SEQ ID NO: 80734 - DNA, 120 bp, Homo sapiens
  misc_feature: 500 for SV(C|O) and mtDNA
aggaatcacctcccattccgataaaatcaccttccacccttactacacaatcaaagacgccctcggcttacttctcttccttctctccttaatgacattaacactattctcaccagacct

SEQ ID NO: 80735 - DNA, 120 bp, Homo sapiens
  misc_feature: 499 for SV(C|O) and mtDNA
ttttgggggaggttatatgggtttaatagtttttttaatttatttagggggaatgatggttgtctttggatatactacagcgatggctattgaggagtatcctgaggcatgggggtcagg

SEQ ID NO: 80736 - DNA, 120 bp, Homo sapiens
  misc_feature: 499 for SV(C|O) and mtDNA
tttgggggaggttatatgggtttaatagtttttttaatttatttagggggaatgatggttgtctttggatatactacagcgatggctattgaggagtatcctgaggcatgggggtcaggg

SEQ ID NO: 80737 - DNA, 120 bp, Homo sapiens
  misc_feature: 499 for SV(C|O) and mtDNA
ttaatcactgctgtttcccgtgggggtgtggctaggctaagcgttttgagctgcattgctgcgtgcttgatgcttgtcccttttgatcgtggtgatttagagggtgaactcactggaacg

SEQ ID NO: 80738 - DNA, 120 bp, Homo sapiens
  misc_feature: 499 for SV(C|O) and mtDNA
gccaccgcggtcacacgattaacccaagtcaatagaagccggcgtaaagagtgttttagatcaccccctccccaataaagctaaaactcacctgagttgtaaaaaactccagctgacaca

SEQ ID NO: 80739 - DNA, 120 bp, Homo sapiens
  misc_feature: 499 for SV(C|O) and mtDNA
tgtggtaaatatgtagagggagtatagggctgtgactagtatgttgagtcctgtaagtaggagagtgatatttgatcaggagaacgtggttactagcacagagagttctcccagtaggtt

SEQ ID NO: 80740 - DNA, 120 bp, Homo sapiens; identical to SEQ ID NO: 58206
  misc_feature: 499 for SV(C|O) and mtDNA

SEQ ID NO: 80741 - DNA, 120 bp, Homo sapiens
  misc_feature: 499 for SV(C|O) and mtDNA
tggcgtgaaggtagcggatgattcagccataatttacgtctcgagtgatgtgggcgattgatgaaaaggcggttgaggcgtctggtgagtagtgcatggctaggaatagtcctgtggtga

SEQ ID NO: 80742 - DNA, 120 bp, Homo sapiens
  misc_feature: 499 for SV(C|O) and mtDNA
tggccaagggtcatgatggcaggagtaatcagaggtgttcttgtgttgtgataagggtggagaggttaaaggagccacttattagtaatgttgatagtagaatgatggctagggtgactt

SEQ ID NO: 80743 - DNA, 120 bp, Homo sapiens
  misc_feature: 499 for SV(C|O) and mtDNA
caaacaatctcatatgaagtcaccctagccatcattctactatcaacattactaataagtggctcctttaacctctccacccttatcacaacacaagaacacctctgattactcctgcca

SEQ ID NO: 80744 - DNA, 120 bp, Homo sapiens
  misc_feature: 499 for SV(C|O) and mtDNA
tgcttaccgaacgaaaaattctaggctatatacaactacgcaaaggccccaacgttgtaggcccctacgggctactacaacccttcgctgacgccataaaactcttcaccaaagagcccc

SEQ ID NO: 80745 - DNA, 120 bp, Homo sapiens
  misc_feature: 499 for SV(C|O) and mtDNA
tcaggcgtttaatggggtttagtagggtggggttattttcgttaatgttagtaagggtggggaagcgaggttgacctgttagggtgagaagaattattcgagtgctataggcgcttgtca

SEQ ID NO: 80746 - DNA, 120 bp, Homo sapiens
  misc_feature: 499 for SV(C|O) and mtDNA
gccaagggtcatgatggcaggagtaatcagaggtgttcttgtgttgtgataagggtggagaggttaaaggagccacttattagtaatgttgatagtagaatgatggctagggtgacttca

SEQ ID NO: 80747 - DNA, 120 bp, Homo sapiens
  misc_feature: 499 for SV(C|O) and mtDNA
tccctgacaagcgcctatagcactcgaataattcttctcaccctaacaggtcaacctcgcttccccacccttactaacattaacgaaaataaccccaccctactaaaccccattaaacgc

SEQ ID NO: 80748 - DNA, 120 bp, Homo sapiens
  misc_feature: 499 for SV(C|O) and mtDNA
gaaggtagcggatgattcagccataatttacgtctcgagtgatgtgggcgattgatgaaaaggcggttgaggcgtctggtgagtagtgcatggctaggaatagtcctgtggtgatttgga

SEQ ID NO: 80749 - DNA, 120 bp, Homo sapiens
  misc_feature: 499 for SV(C|O) and mtDNA
tagggtaaatacgggccctatttcaaagatttttaggggaattaattctaggacgatgggcatgaaactgtggtttgctccacagatttcagagcattgaccgtagtatacccccggtcg

SEQ ID NO: 80750 - DNA, 120 bp, Homo sapiens
  misc_feature: 499 for SV(C|O) and mtDNA
gtggtaaatatgtagagggagtatagggctgtgactagtatgttgagtcctgtaagtaggagagtgatatttgatcaggagaacgtggttactagcacagagagttctcccagtaggtta

SEQ ID NO: 80751 - DNA, 120 bp, Homo sapiens; identical to SEQ ID NO: 58988
  misc_feature: 499 for SV(C|O) and mtDNA

SEQ ID NO: 80752 - DNA, 120 bp, Homo sapiens
  misc_feature: 499 for SV(C|O) and mtDNA
aaatctgtggagcaaaccacagtttcatgcccatcgtcctagaattaattcccctaaaaatctttgaaatagggcccgtatttaccctatagcaccccctctaccccctctagagcccac

SEQ ID NO: 80753 - DNA, 120 bp, Homo sapiens; identical to SEQ ID NO: 57749
  misc_feature: 499 for SV(C|O) and mtDNA

SEQ ID NO: 80754 - DNA, 120 bp, Homo sapiens; identical to SEQ ID NO: 57902
  misc_feature: 499 for SV(C|O) and mtDNA

SEQ ID NO: 80755 - DNA, 120 bp, Homo sapiens; identical to SEQ ID NO: 62898
  misc_feature: 499 for SV(C|O) and mtDNA

SEQ ID NO: 80756 - DNA, 120 bp, Homo sapiens; identical to SEQ ID NO: 59309
  misc_feature: 499 for SV(C|O) and mtDNA

SEQ ID NO: 80757 - DNA, 120 bp, Homo sapiens
  misc_feature: 499 for SV(C|O) and mtDNA
cagacgaaaataccaaatgcatggagagctcccgtgagtggttaatagggtgatagacctgtgatccatcgtgatgtcttatttaaggggaacgtgtgggctatttaggctttatggccc

SEQ ID NO: 80758 - DNA, 120 bp, Homo sapiens
  misc_feature: 499 for SV(C|O) and mtDNA
gacgttgacaatcgagtagtactcccgattgaagcccccattcgtataataattacatcacaagacgtcttgcactcatgagctgtccccacattaggcttaaaaacagatgcaattccc

SEQ ID NO: 80759 - DNA, 120 bp, Homo sapiens
  misc_feature: 499 for SV(C|O) and mtDNA
ggaatcacctcccattccgataaaatcaccttccacccttactacacaatcaaagacgccctcggcttacttctcttccttctctccttaatgacattaacactattctcaccagacctc

SEQ ID NO: 80760 - DNA, 120 bp, Homo sapiens; identical to SEQ ID NO: 56414
  misc_feature: 499 for SV(C|O) and mtDNA

SEQ ID NO: 80761 - DNA, 120 bp, Homo sapiens
  misc_feature: 499 for SV(C|O) and mtDNA
aaatacgggccctatttcaaagatttttaggggaattaattctaggacgatgggcatgaaactgtggtttgctccacagatttcagagcattgaccgtagtatacccccggtcgtgtagc

SEQ ID NO: 80762 - DNA, 120 bp, Homo sapiens
  misc_feature: 499 for SV(C|O) and mtDNA
cccagacgaaaataccaaatgcatggagagctcccgtgagtggttaatagggtgatagacctgtgatccatcgtgatgtcttatttaaggggaacgtgtgggctatttaggctttatggc

SEQ ID NO: 80763 - DNA, 120 bp, Homo sapiens
  misc_feature: 499 for SV(C|O) and mtDNA
cccgcacaagagtgctactctcctcgctccgggcccataacacttgggggtagctaaagtgaactgtatccgacatctggttcctacttcagggccataaagcctaaatagcccacacgt

SEQ ID NO: 80764 - DNA, 120 bp, Homo sapiens
  misc_feature: 499 for SV(C|O) and mtDNA
agccatactatttatgtgctccgggtccatcatccacaaccttaacaatgaacaagatatccgaaaaataggaggactactcaaaaccatacctctcacttcaacctccctcaccattgg

SEQ ID NO: 80765 - DNA, 120 bp, Homo sapiens
  misc_feature: 499 for SV(C|O) and mtDNA
aacctttagcaataaacgaaagtttaactaagctatactaaccccagggttggtcaatttcgtgccagccaccgcggtcacacgattaacccaagtcaatagaagccggcgtaaagagtg

SEQ ID NO: 80766 - DNA, 120 bp, Homo sapiens
  misc_feature: 499 for SV(C|O) and mtDNA
cacaggtttctactccaaagaccacatcatcgaaaccgcaaacatatcatacacaaacgcctgagccctatctattactctcatcgctacctccctgacaagcgcctatagcactcgaat

SEQ ID NO: 80767 - DNA, 120 bp, Homo sapiens; identical to SEQ ID NO: 59702
  misc_feature: 499 for SV(C|O) and mtDNA

SEQ ID NO: 80768 - DNA, 120 bp, Homo sapiens
  misc_feature: 499 for SV(C|O) and mtDNA
aaagccatactatttatgtgctccgggtccatcatccacaaccttaacaatgaacaagatatccgaaaaataggaggactactcaaaaccatacctctcacttcaacctccctcaccatt

SEQ ID NO: 80769 - DNA, 120 bp, Homo sapiens; identical to SEQ ID NO: 59059
  misc_feature: 498 for SV(C|O) and mtDNA

SEQ ID NO: 80770 - DNA, 120 bp, Homo sapiens
  misc_feature: 498 for SV(C|O) and mtDNA
tccacccttatcacaacacaagaacacctctgattactcctgccatcatgacccttggccataatatgatttatctccacactagcagagaccaaccgaacccccttcgaccttgccgaa

SEQ ID NO: 80771 - DNA, 120 bp, Homo sapiens
  misc_feature: 498 for SV(C|O) and mtDNA
ggttttgagtagtcctcctatttttcggatatcttgttcattgttaaggttgtggatgatggacccggagcacataaatagtatggctttgaagaaggcgtgggtacagatgtgcaggaa

SEQ ID NO: 80772 - DNA, 120 bp, Homo sapiens
  misc_feature: 498 for SV(C|O) and mtDNA
ttagcaataaacgaaagtttaactaagctatactaaccccagggttggtcaatttcgtgccagccaccgcggtcacacgattaacccaagtcaatagaagccggcgtaaagagtgtttta

SEQ ID NO: 80773 - DNA, 120 bp, Homo sapiens; identical to SEQ ID NO: 62435
  misc_feature: 498 for SV(C|O) and mtDNA

SEQ ID NO: 80774 - DNA, 120 bp, Homo sapiens
  misc_feature: 498 for SV(C|O) and mtDNA
tgattactcctgccatcatgacccttggccataatatgatttatctccacactagcagagaccaaccgaacccccttcgaccttgccgaaggagagtccgaactagtctcaggcttcaac

SEQ ID NO: 80775 - DNA, 120 bp, Homo sapiens
  misc_feature: 498 for SV(C|O) and mtDNA
acaatctcatatgaagtcaccctagccatcattctactatcaacattactaataagtggctcctttaacctctccacccttatcacaacacaagaacacctctgattactcctgccatca

SEQ ID NO: 80776 - DNA, 120 bp, Homo sapiens
  misc_feature: 498 for SV(C|O) and mtDNA
tgagatatttggaggtggggatcaatagagggggaaatagaatgatcagtactgcggcgggtaggcctaggattgtgggggcaatgaatgaagcgaacagattttcgttcattttggttc

SEQ ID NO: 80777 - DNA, 120 bp, Homo sapiens
  misc_feature: 498 for SV(C|O) and mtDNA
tctgctagggggtggaagcggatgagtaagaagattcctgctacaactatagtgcttgagtggagtagggctgagactggggtggggccttctatggctgaggggagtcaggggtggaga

SEQ ID NO: 80778 - DNA, 120 bp, Homo sapiens
  misc_feature: 498 for SV(C|O) and mtDNA
caaaatatgttgtgtagagttcaggggagagtgcgtcatatgttgttcctaggaagattgtagtggtgagggtgtttattataataatgtttgtgtattcggctatgaagaataaggcga

SEQ ID NO: 80779 - DNA, 120 bp, Homo sapiens
  misc_feature: 498 for SV(C|O) and mtDNA
tcccttaccatcaaatcaattggccaccaatggtactgaacctacgagtacaccgactacggcggactaatcttcaactcctacatacttcccccattattcctagaaccaggcgacctg

SEQ ID NO: 80780 - DNA, 120 bp, Homo sapiens; identical to SEQ ID NO: 57994
  misc_feature: 498 for SV(C|O) and mtDNA

SEQ ID NO: 80781 - DNA, 120 bp, Homo sapiens
  misc_feature: 498 for SV(C|O) and mtDNA
tcaaagatttttaggggaattaattctaggacgatgggcatgaaactgtggtttgctccacagatttcagagcattgaccgtagtatacccccggtcgtgtagcggtgaaagtggtttgg

SEQ ID NO: 80782 - DNA, 120 bp, Homo sapiens; identical to SEQ ID NO: 59981
  misc_feature: 498 for SV(C|O) and mtDNA

SEQ ID NO: 80783 - DNA, 120 bp, Homo sapiens; identical to SEQ ID NO: 56374
  misc_feature: 498 for SV(C|O) and mtDNA

SEQ ID NO: 80784 - DNA, 120 bp, Homo sapiens
  misc_feature: 498 for SV(C|O) and mtDNA
taattcttctcaccctaacaggtcaacctcgcttccccacccttactaacattaacgaaaataaccccaccctactaaaccccattaaacgcctgacagccggaagcctattcgcaggat

SEQ ID NO: 80785 - DNA, 120 bp, Homo sapiens
  misc_feature: 498 for SV(C|O) and mtDNA
gtttattgctaaaggttaatcactgctgtttcccgtgggggtgtggctaggctaagcgttttgagctgcattgctgcgtgcttgatgcttgtcccttttgatcgtggtgatttagagggt

SEQ ID NO: 80786 - DNA, 120 bp, Homo sapiens
  misc_feature: 498 for SV(C|O) and mtDNA
agaggagacacctgctaggtgtaaggagaagatggttaggtctacggaggctccagggtgggagtagttccctgctaagggagggtagactgttcaacctgttcctgctccggcctccac

SEQ ID NO: 80787 - DNA, 120 bp, Homo sapiens
  misc_feature: 498 for SV(C|O) and mtDNA
ggccaagggtcatgatggcaggagtaatcagaggtgttcttgtgttgtgataagggtggagaggttaaaggagccacttattagtaatgttgatagtagaatgatggctagggtgacttc

SEQ ID NO: 80788 - DNA, 120 bp, Homo sapiens; identical to SEQ ID NO: 62361
  misc_feature: 498 for SV(C|O) and mtDNA

SEQ ID NO: 80789 - DNA, 120 bp, Homo sapiens
  misc_feature: 498 for SV(C|O) and mtDNA
cataggaggtgtatgagttggtcgtagcggaatcgggggtatgctgttcgaattcataagaacagggaggttagaagtagggtcttggtgacaaaatatgttgtgtagagttcaggggag

SEQ ID NO: 80790 - DNA, 120 bp, Homo sapiens
  misc_feature: 498 for SV(C|O) and mtDNA
cctttagcaataaacgaaagtttaactaagctatactaaccccagggttggtcaatttcgtgccagccaccgcggtcacacgattaacccaagtcaatagaagccggcgtaaagagtgtt

SEQ ID NO: 80791 - DNA, 120 bp, Homo sapiens
  misc_feature: 498 for SV(C|O) and mtDNA
aatcactgctgtttcccgtgggggtgtggctaggctaagcgttttgagctgcattgctgcgtgcttgatgcttgtcccttttgatcgtggtgatttagagggtgaactcactggaacggg

SEQ ID NO: 80792 - DNA, 120 bp, Homo sapiens; identical to SEQ ID NO: 62231
  misc_feature: 498 for SV(C|O) and mtDNA

SEQ ID NO: 80793 - DNA, 120 bp, Homo sapiens
  misc_feature: 498 for SV(C|O) and mtDNA
ccaagggtcatgatggcaggagtaatcagaggtgttcttgtgttgtgataagggtggagaggttaaaggagccacttattagtaatgttgatagtagaatgatggctagggtgacttcat

SEQ ID NO: 80794 - DNA, 120 bp, Homo sapiens
  misc_feature: 498 for SV(C|O) and mtDNA
atagcaggcagttgaggtggattaaaccaaacccagctacgcaaaatcttagcatactcctcaattacccacataggatgaataatagcagttctaccgtacaaccctaacataaccatt

SEQ ID NO: 80795 - DNA, 120 bp, Homo sapiens
  misc_feature: 498 for SV(C|O) and mtDNA
aatctgtggagcaaaccacagtttcatgcccatcgtcctagaattaattcccctaaaaatctttgaaatagggcccgtatttaccctatagcaccccctctaccccctctagagcccact

SEQ ID NO: 80796 - DNA, 120 bp, Homo sapiens
  misc_feature: 498 for SV(C|O) and mtDNA
acctttagcaataaacgaaagtttaactaagctatactaaccccagggttggtcaatttcgtgccagccaccgcggtcacacgattaacccaagtcaatagaagccggcgtaaagagtgt

SEQ ID NO: 80797 - DNA, 120 bp, Homo sapiens
  misc_feature: 497 for SV(C|O) and mtDNA
ttggtatgtgctttctcgtgttacatcgcgccatcattggtatatggttagtgtgttggttagtaggcctagtatgaggagcgttatggagtggaagtgaaatcacatggctaggccgga

SEQ ID NO: 80798 - DNA, 120 bp, Homo sapiens
  misc_feature: 497 for SV(C|O) and mtDNA
ttgggggaggttatatgggtttaatagtttttttaatttatttagggggaatgatggttgtctttggatatactacagcgatggctattgaggagtatcctgaggcatgggggtcagggg

SEQ ID NO: 80799 - DNA, 120 bp, Homo sapiens
  misc_feature: 497 for SV(C|O) and mtDNA
agcattcctgcacatctgtacccacgccttcttcaaagccatactatttatgtgctccgggtccatcatccacaaccttaacaatgaacaagatatccgaaaaataggaggactactcaa

SEQ ID NO: 80800 - DNA, 120 bp, Homo sapiens
  misc_feature: 497 for SV(C|O) and mtDNA
ttcgaccttgccgaaggagagtccgaactagtctcaggcttcaacatcgaatacgccgcaggccccttcgccttattcttcatagccgaatacacaaacattattataataaacaccctc

SEQ ID NO: 80801 - DNA, 120 bp, Homo sapiens
  misc_feature: 497 for SV(C|O) and mtDNA
ttccggctgtcaggcgtttaatggggtttagtagggtggggttattttcgttaatgttagtaagggtggggaagcgaggttgacctgttagggtgagaagaattattcgagtgctatagg

SEQ ID NO: 80802 - DNA, 120 bp, Homo sapiens; identical to SEQ ID NO: 55164
  misc_feature: 497 for SV(C|O) and mtDNA

SEQ ID NO: 80803 - DNA, 120 bp, Homo sapiens
  misc_feature: 497 for SV(C|O) and mtDNA
aaaccctgagaaccaaaatgaacgaaaatctgttcgcttcattcattgcccccacaatcctaggcctacccgccgcagtactgatcattctatttccccctctattgatccccacctcca

SEQ ID NO: 80804 - DNA, 120 bp, Homo sapiens
  misc_feature: 497 for SV(C|O) and mtDNA
tgctgtttcccgtgggggtgtggctaggctaagcgttttgagctgcattgctgcgtgcttgatgcttgtcccttttgatcgtggtgatttagagggtgaactcactggaacggggatgct

SEQ ID NO: 80805 - DNA, 120 bp, Homo sapiens
  misc_feature: 497 for SV(C|O) and mtDNA
tcttatccatcatagcaggcagttgaggtggattaaaccaaacccagctacgcaaaatcttagcatactcctcaattacccacataggatgaataatagcagttctaccgtacaacccta

SEQ ID NO: 80806 - DNA, 120 bp, Homo sapiens
  misc_feature: 497 for SV(C|O) and mtDNA
tccccatacccaaccccctggtcaacctcaacctaggcctcctatttattctagccacctctagcctagccgtttactcaatcctctgatcagggtgagcatcaaactcaaactacgccc

SEQ ID NO: 80807 - DNA, 120 bp, Homo sapiens
  misc_feature: 497 for SV(C|O) and mtDNA
tccaaaattctccgtgccacctatcacaccccatcctaaagtaaggtcagctaaataagctatcgggcccataccccgaaaatgttggttatacccttcccgtactaattaatcccctgg

SEQ ID NO: 80808 - DNA, 120 bp, Homo sapiens; identical to SEQ ID NO: 59552
  misc_feature: 497 for SV(C|O) and mtDNA

SEQ ID NO: 80809 - DNA, 120 bp, Homo sapiens
  misc_feature: 497 for SV(C|O) and mtDNA
gctcgtaagaaggcctagataggggattgtgcggtgtgtgatggtagggtagaatccgagtatgttggagaaataaaatgtgcatagtggggattttattttaagtttgttggttaggta

SEQ ID NO: 80810 - DNA, 120 bp, Homo sapiens; identical to SEQ ID NO: 58561
  misc_feature: 497 for SV(C|O) and mtDNA

SEQ ID NO: 80811 - DNA, 120 bp, Homo sapiens
  misc_feature: 497 for SV(C|O) and mtDNA
accccccagacgaaaataccaaatgcatggagagctcccgtgagtggttaatagggtgatagacctgtgatccatcgtgatgtcttatttaaggggaacgtgtgggctatttaggcttta

SEQ ID NO: 80812 - DNA, 120 bp, Homo sapiens
  misc_feature: 497 for SV(C|O) and mtDNA
gtgtatgagttggtcgtagcggaatcgggggtatgctgttcgaattcataagaacagggaggttagaagtagggtcttggtgacaaaatatgttgtgtagagttcaggggagagtgcgtc

SEQ ID NO: 80813 - DNA, 120 bp, Homo sapiens
  misc_feature: 497 for SV(C|O) and mtDNA
ctgccatcatgacccttggccataatatgatttatctccacactagcagagaccaaccgaacccccttcgaccttgccgaaggagagtccgaactagtctcaggcttcaacatcgaatac

SEQ ID NO: 80814 - DNA, 120 bp, Homo sapiens
  misc_feature: 497 for SV(C|O) and mtDNA
ggtgtatgagttggtcgtagcggaatcgggggtatgctgttcgaattcataagaacagggaggttagaagtagggtcttggtgacaaaatatgttgtgtagagttcaggggagagtgcgt

SEQ ID NO: 80815 - DNA, 120 bp, Homo sapiens
  misc_feature: 497 for SV(C|O) and mtDNA
atcgctacctccctgacaagcgcctatagcactcgaataattcttctcaccctaacaggtcaacctcgcttccccacccttactaacattaacgaaaataaccccaccctactaaacccc

SEQ ID NO: 80816 - DNA, 120 bp, Homo sapiens
  misc_feature: 497 for SV(C|O) and mtDNA
cctctcacttcaacctccctcaccattggcagcctagcattagcaggaatacctttcctcacaggtttctactccaaagaccacatcatcgaaaccgcaaacatatcatacacaaacgcc

SEQ ID NO: 80817 - DNA, 120 bp, Homo sapiens
  misc_feature: 497 for SV(C|O) and mtDNA
caaccccctggtcaacctcaacctaggcctcctatttattctagccacctctagcctagccgtttactcaatcctctgatcagggtgagcatcaaactcaaactacgccctgatcggcgc

SEQ ID NO: 80818 - DNA, 120 bp, Homo sapiens; identical to SEQ ID NO: 61603
  misc_feature: 497 for SV(C|O) and mtDNA

SEQ ID NO: 80819 - DNA, 120 bp, Homo sapiens
  misc_feature: 497 for SV(C|O) and mtDNA
cctaggaaagtgacagcgagggctgtgagttttaggtagagggggattgttgtttggaagggggatgcgggggaaatgttgttagtaatgagaaatcctgcgaataggcttccggctgtc

SEQ ID NO: 80820 - DNA, 120 bp, Homo sapiens
  misc_feature: 497 for SV(C|O) and mtDNA
ctcaccctgatcagaggattgagtaaacggctaggctagaggtggctagaataaataggaggcctaggttgaggttgaccagggggttgggtatggggaggggggttcatagtagaagag

SEQ ID NO: 80821 - DNA, 120 bp, Homo sapiens
  misc_feature: 497 for SV(C|O) and mtDNA
ctcgtaagaaggcctagataggggattgtgcggtgtgtgatggtagggtagaatccgagtatgttggagaaataaaatgtgcatagtggggattttattttaagtttgttggttaggtag

SEQ ID NO: 80822 - DNA, 120 bp, Homo sapiens
  misc_feature: 497 for SV(C|O) and mtDNA
ccttggtatgtgctttctcgtgttacatcgcgccatcattggtatatggttagtgtgttggttagtaggcctagtatgaggagcgttatggagtggaagtgaaatcacatggctaggccg

SEQ ID NO: 80823 - DNA, 120 bp, Homo sapiens
  misc_feature: 497 for SV(C|O) and mtDNA
caatatgggagattattccgaagcctggtaggataagaatataaacttcagggtgaccgaaaaatcagaataggtgttggtatagaatggggtctcctcctccggcggggtcgaagaagg

SEQ ID NO: 80824 - DNA, 120 bp, Homo sapiens
  misc_feature: 497 for SV(C|O) and mtDNA
cctcatcgccctcccatccctgcgcatcctttacataacagacgaggtcaacgatccctcccttaccatcaaatcaattggccaccaatggtactgaacctacgagtacaccgactacgg

SEQ ID NO: 80825 - DNA, 120 bp, Homo sapiens; identical to SEQ ID NO: 60367
  misc_feature: 497 for SV(C|O) and mtDNA

SEQ ID NO: 80826 - DNA, 120 bp, Homo sapiens
  misc_feature: 497 for SV(C|O) and mtDNA
atggccaagggtcatgatggcaggagtaatcagaggtgttcttgtgttgtgataagggtggagaggttaaaggagccacttattagtaatgttgatagtagaatgatggctagggtgact

SEQ ID NO: 80827 - DNA, 120 bp, Homo sapiens
  misc_feature: 496 for SV(C|O) and mtDNA
aacaggtcaacctcgcttccccacccttactaacattaacgaaaataaccccaccctactaaaccccattaaacgcctgacagccggaagcctattcgcaggatttctcattactaacaa

SEQ ID NO: 80828 - DNA, 120 bp, Homo sapiens; identical to SEQ ID NO: 60050
  misc_feature: 496 for SV(C|O) and mtDNA

SEQ ID NO: 80829 - DNA, 120 bp, Homo sapiens
  misc_feature: 496 for SV(C|O) and mtDNA
ttcataggaggtgtatgagttggtcgtagcggaatcgggggtatgctgttcgaattcataagaacagggaggttagaagtagggtcttggtgacaaaatatgttgtgtagagttcagggg

SEQ ID NO: 80830 - DNA, 120 bp, Homo sapiens
  misc_feature: 496 for SV(C|O) and mtDNA
tctcaatcttatccatcatagcaggcagttgaggtggattaaaccaaacccagctacgcaaaatcttagcatactcctcaattacccacataggatgaataatagcagttctaccgtaca

SEQ ID NO: 80831 - DNA, 120 bp, Homo sapiens
  misc_feature: 496 for SV(C|O) and mtDNA
ctgtcactttcctaggacttctaacagccctagacctcaactacctaaccaacaaacttaaaataaaatccccactatgcacattttatttctccaacatactcggattctaccctacca

SEQ ID NO: 80832 - DNA, 120 bp, Homo sapiens
  misc_feature: 496 for SV(C|O) and mtDNA
tgatgctcaccctgatcagaggattgagtaaacggctaggctagaggtggctagaataaataggaggcctaggttgaggttgaccagggggttgggtatggggaggggggttcatagtag

SEQ ID NO: 80833 - DNA, 120 bp, Homo sapiens
  misc_feature: 496 for SV(C|O) and mtDNA
ctccacccttatcacaacacaagaacacctctgattactcctgccatcatgacccttggccataatatgatttatctccacactagcagagaccaaccgaacccccttcgaccttgccga

SEQ ID NO: 80834 - DNA, 120 bp, Homo sapiens
  misc_feature: 496 for SV(C|O) and mtDNA
gtcgcctaggaggtctggtgagaatagtgttaatgtcattaaggagagaaggaagagaagtaagccgagggcgtctttgattgtgtagtaagggtggaaggtgattttatcggaatggga

SEQ ID NO: 80835 - DNA, 120 bp, Homo sapiens; identical to SEQ ID NO: 60797
  misc_feature: 496 for SV(C|O) and mtDNA

SEQ ID NO: 80836 - DNA, 120 bp, Homo sapiens; identical to SEQ ID NO: 62902
  misc_feature: 496 for SV(C|O) and mtDNA

SEQ ID NO: 80837 - DNA, 120 bp, Homo sapiens
  misc_feature: 496 for SV(C|O) and mtDNA
acgaaaataccaaatgcatggagagctcccgtgagtggttaatagggtgatagacctgtgatccatcgtgatgtcttatttaaggggaacgtgtgggctatttaggctttatggccctga

SEQ ID NO: 80838 - DNA, 120 bp, Homo sapiens
  misc_feature: 496 for SV(C|O) and mtDNA
tatggccaagggtcatgatggcaggagtaatcagaggtgttcttgtgttgtgataagggtggagaggttaaaggagccacttattagtaatgttgatagtagaatgatggctagggtgac

SEQ ID NO: 80839 - DNA, 120 bp, Homo sapiens
  misc_feature: 496 for SV(C|O) and mtDNA
gcgcccttacacaaaatgacatcaaaaaaatcgtagccttctccacttcaagtcaactaggactcataatagttacaatcggcatcaaccaaccacacctagcattcctgcacatctgta

SEQ ID NO: 80840 - DNA, 120 bp, Homo sapiens
  misc_feature: 496 for SV(C|O) and mtDNA
taatcactgctgtttcccgtgggggtgtggctaggctaagcgttttgagctgcattgctgcgtgcttgatgcttgtcccttttgatcgtggtgatttagagggtgaactcactggaacgg

SEQ ID NO: 80841 - DNA, 120 bp, Homo sapiens
  misc_feature: 496 for SV(C|O) and mtDNA
gttttgagtagtcctcctatttttcggatatcttgttcattgttaaggttgtggatgatggacccggagcacataaatagtatggctttgaagaaggcgtgggtacagatgtgcaggaat

SEQ ID NO: 80842 - DNA, 120 bp, Homo sapiens
  misc_feature: 496 for SV(C|O) and mtDNA
gttcaacctgttcctgctccggcctccactatagcagatgcgagcaggagtaggagagagggaggtaagagtcagaagcttatgttgtttatgcggggaaacgccatatcgggggcaccg

SEQ ID NO: 80843 - DNA, 120 bp, Homo sapiens
  misc_feature: 496 for SV(C|O) and mtDNA
gtcttgtgatgtaattattatacgaatgggggcttcaatcgggagtactactcgattgtcaacgtcaaggagtcgcaggtcgcctggttctaggaataatgggggaagtatgtaggagtt

SEQ ID NO: 80844 - DNA, 120 bp, Homo sapiens
  misc_feature: 496 for SV(C|O) and mtDNA
attagctcttagtaagattacacatgcaagcatccccgttccagtgagttcaccctctaaatcaccacgatcaaaagggacaagcatcaagcacgcagcaatgcagctcaaaacgcttag

SEQ ID NO: 80845 - DNA, 120 bp, Homo sapiens
  misc_feature: 496 for SV(C|O) and mtDNA
cctatttcaaagatttttaggggaattaattctaggacgatgggcatgaaactgtggtttgctccacagatttcagagcattgaccgtagtatacccccggtcgtgtagcggtgaaagtg

SEQ ID NO: 80846 - DNA, 120 bp, Homo sapiens; identical to SEQ ID NO: 59033
  misc_feature: 496 for SV(C|O) and mtDNA

SEQ ID NO: 80847 - DNA, 120 bp, Homo sapiens; identical to SEQ ID NO: 60246
  misc_feature: 496 for SV(C|O) and mtDNA

SEQ ID NO: 80848 - DNA, 120 bp, Homo sapiens; identical to SEQ ID NO: 62938
  misc_feature: 496 for SV(C|O) and mtDNA

SEQ ID NO: 80849 - DNA, 120 bp, Homo sapiens
  misc_feature: 496 for SV(C|O) and mtDNA
aacgtggttactagcacagagagttctcccagtaggttaatagtggggggtaaggcgaggttagcgaggcttgctagaagtcatcaaaaagctattagtgggagtagagtttgaagtcct

SEQ ID NO: 80850 - DNA, 120 bp, Homo sapiens
  misc_feature: 495 for SV(C|O) and mtDNA
ttttgagtagtcctcctatttttcggatatcttgttcattgttaaggttgtggatgatggacccggagcacataaatagtatggctttgaagaaggcgtgggtacagatgtgcaggaatg

SEQ ID NO: 80851 - DNA, 120 bp, Homo sapiens
  misc_feature: 495 for SV(C|O) and mtDNA
gcattcctgcacatctgtacccacgccttcttcaaagccatactatttatgtgctccgggtccatcatccacaaccttaacaatgaacaagatatccgaaaaataggaggactactcaaa

SEQ ID NO: 80852 - DNA, 120 bp, Homo sapiens
  misc_feature: 495 for SV(C|O) and mtDNA
gaacccccctccccatacccaaccccctggtcaacctcaacctaggcctcctatttattctagccacctctagcctagccgtttactcaatcctctgatcagggtgagcatcaaactcaa

SEQ ID NO: 80853 - DNA, 120 bp, Homo sapiens
  misc_feature: 495 for SV(C|O) and mtDNA
ccggtcgtgtagcggtgaaagtggtttggtttagacgtccgggaattgcatctgtttttaagcctaatgtggggacagctcatgagtgcaagacgtcttgtgatgtaattattatacgaa

SEQ ID NO: 80854 - DNA, 120 bp, Homo sapiens
  misc_feature: 495 for SV(C|O) and mtDNA
tattgctaaaggttaatcactgctgtttcccgtgggggtgtggctaggctaagcgttttgagctgcattgctgcgtgcttgatgcttgtcccttttgatcgtggtgatttagagggtgaa

SEQ ID NO: 80855 - DNA, 120 bp, Homo sapiens
  misc_feature: 495 for SV(C|O) and mtDNA
tagctaaagtgaactgtatccgacatctggttcctacttcagggccataaagcctaaatagcccacacgttccccttaaataagacatcacgatggatcacaggtctatcaccctattaa

SEQ ID NO: 80856 - DNA, 120 bp, Homo sapiens; identical to SEQ ID NO: 52501
  misc_feature: 495 for SV(C|O) and mtDNA

SEQ ID NO: 80857 - DNA, 120 bp, Homo sapiens
  misc_feature: 495 for SV(C|O) and mtDNA
cgagaagaccctatggagctttaatttattaatgcaaacagtacctaacaaacccacaggtcctaaactaccaaacctgcattaaaaatttcggttggggcgacctcggagcagaaccca

SEQ ID NO: 80858 - DNA, 120 bp, Homo sapiens
  misc_feature: 495 for SV(C|O) and mtDNA
tgagccccattgtgttgtggtaaatatgtagagggagtatagggctgtgactagtatgttgagtcctgtaagtaggagagtgatatttgatcaggagaacgtggttactagcacagagag

SEQ ID NO: 80859 - DNA, 120 bp, Homo sapiens; identical to SEQ ID NO: 56937
  misc_feature: 495 for SV(C|O) and mtDNA

SEQ ID NO: 80860 - DNA, 120 bp, Homo sapiens
  misc_feature: 495 for SV(C|O) and mtDNA
tcacagcagtcctacttctcctatctctcccagtcctagctgctggcatcactatactactaacagaccgcaacctcaacaccaccttcttcgaccccgccggaggaggagaccccattc

SEQ ID NO: 80861 - DNA, 120 bp, Homo sapiens
  misc_feature: 495 for SV(C|O) and mtDNA
tcaatcttatccatcatagcaggcagttgaggtggattaaaccaaacccagctacgcaaaatcttagcatactcctcaattacccacataggatgaataatagcagttctaccgtacaac

SEQ ID NO: 80862 - DNA, 120 bp, Homo sapiens
  misc_feature: 495 for SV(C|O) and mtDNA
gggaggttatatgggtttaatagtttttttaatttatttagggggaatgatggttgtctttggatatactacagcgatggctattgaggagtatcctgaggcatgggggtcaggggttga

SEQ ID NO: 80863 - DNA, 120 bp, Homo sapiens; identical to SEQ ID NO: 58805
  misc_feature: 495 for SV(C|O) and mtDNA

SEQ ID NO: 80864 - DNA, 120 bp, Homo sapiens; identical to SEQ ID NO: 58415
  misc_feature: 495 for SV(C|O) and mtDNA

SEQ ID NO: 80865 - DNA, 120 bp, Homo sapiens
  misc_feature: 495 for SV(C|O) and mtDNA
agctaaagtgaactgtatccgacatctggttcctacttcagggccataaagcctaaatagcccacacgttccccttaaataagacatcacgatggatcacaggtctatcaccctattaac

SEQ ID NO: 80866 - DNA, 120 bp, Homo sapiens
  misc_feature: 495 for SV(C|O) and mtDNA
cactttcctaggacttctaacagccctagacctcaactacctaaccaacaaacttaaaataaaatccccactatgcacattttatttctccaacatactcggattctaccctaccatcac

SEQ ID NO: 80867 - DNA, 120 bp, Homo sapiens
  misc_feature: 495 for SV(C|O) and mtDNA
ggtcaacctcgcttccccacccttactaacattaacgaaaataaccccaccctactaaaccccattaaacgcctgacagccggaagcctattcgcaggatttctcattactaacaacatt

SEQ ID NO: 80868 - DNA, 120 bp, Homo sapiens
  misc_feature: 495 for SV(C|O) and mtDNA
gctgtcactttcctaggacttctaacagccctagacctcaactacctaaccaacaaacttaaaataaaatccccactatgcacattttatttctccaacatactcggattctaccctacc

SEQ ID NO: 80869 - DNA, 120 bp, Homo sapiens
  misc_feature: 495 for SV(C|O) and mtDNA
ccttaacctctacttctacctacgcctaatctactccacctcaatcacactactccccatatctaacaacgtaaaaataaaatgacagtttgaacatacaaaacccaccccattcctccc

SEQ ID NO: 80870 - DNA, 120 bp, Homo sapiens
  misc_feature: 495 for SV(C|O) and mtDNA
gccctatttcaaagatttttaggggaattaattctaggacgatgggcatgaaactgtggtttgctccacagatttcagagcattgaccgtagtatacccccggtcgtgtagcggtgaaag

SEQ ID NO: 80871 - DNA, 120 bp, Homo sapiens
  misc_feature: 495 for SV(C|O) and mtDNA
ctgctgtttcccgtgggggtgtggctaggctaagcgttttgagctgcattgctgcgtgcttgatgcttgtcccttttgatcgtggtgatttagagggtgaactcactggaacggggatgc

SEQ ID NO: 80872 - DNA, 120 bp, Homo sapiens
  misc_feature: 495 for SV(C|O) and mtDNA
aatacgggccctatttcaaagatttttaggggaattaattctaggacgatgggcatgaaactgtggtttgctccacagatttcagagcattgaccgtagtatacccccggtcgtgtagcg

SEQ ID NO: 80873 - DNA, 120 bp, Homo sapiens
  misc_feature: 495 for SV(C|O) and mtDNA
ccggctgtcaggcgtttaatggggtttagtagggtggggttattttcgttaatgttagtaagggtggggaagcgaggttgacctgttagggtgagaagaattattcgagtgctataggcg

SEQ ID NO: 80874 - DNA, 120 bp, Homo sapiens
  misc_feature: 495 for SV(C|O) and mtDNA
cgagtatgttggagaaataaaatgtgcatagtggggattttattttaagtttgttggttaggtagttgaggtctagggctgttagaagtcctaggaaagtgacagcgagggctgtgagtt

SEQ ID NO: 80875 - DNA, 120 bp, Homo sapiens
  misc_feature: 495 for SV(C|O) and mtDNA
cccccagacgaaaataccaaatgcatggagagctcccgtgagtggttaatagggtgatagacctgtgatccatcgtgatgtcttatttaaggggaacgtgtgggctatttaggctttatg

SEQ ID NO: 80876 - DNA, 120 bp, Homo sapiens
  misc_feature: 495 for SV(C|O) and mtDNA
ccccagacgaaaataccaaatgcatggagagctcccgtgagtggttaatagggtgatagacctgtgatccatcgtgatgtcttatttaaggggaacgtgtgggctatttaggctttatgg

SEQ ID NO: 80877 - DNA, 120 bp, Homo sapiens
  misc_feature: 495 for SV(C|O) and mtDNA
cagggtgagcatcaaactcaaactacgccctgatcggcgcactgcgagcagtagcccaaacaatctcatatgaagtcaccctagccatcattctactatcaacattactaataagtggct

SEQ ID NO: 80878 - DNA, 120 bp, Homo sapiens
  misc_feature: 495 for SV(C|O) and mtDNA
atgagatatttggaggtggggatcaatagagggggaaatagaatgatcagtactgcggcgggtaggcctaggattgtgggggcaatgaatgaagcgaacagattttcgttcattttggtt

SEQ ID NO: 80879 - DNA, 120 bp, Homo sapiens
  misc_feature: 495 for SV(C|O) and mtDNA
agacgaaaataccaaatgcatggagagctcccgtgagtggttaatagggtgatagacctgtgatccatcgtgatgtcttatttaaggggaacgtgtgggctatttaggctttatggccct

SEQ ID NO: 80880 - DNA, 120 bp, Homo sapiens
  misc_feature: 495 for SV(C|O) and mtDNA
aggaggtgtatgagttggtcgtagcggaatcgggggtatgctgttcgaattcataagaacagggaggttagaagtagggtcttggtgacaaaatatgttgtgtagagttcaggggagagt

SEQ ID NO: 80881 - DNA, 120 bp, Homo sapiens
  misc_feature: 494 for SV(C|O) and mtDNA
aaaatatgttgtgtagagttcaggggagagtgcgtcatatgttgttcctaggaagattgtagtggtgagggtgtttattataataatgtttgtgtattcggctatgaagaataaggcgaa

SEQ ID NO: 80882 - DNA, 120 bp, Homo sapiens
  misc_feature: 494 for SV(C|O) and mtDNA
gggccctatttcaaagatttttaggggaattaattctaggacgatgggcatgaaactgtggtttgctccacagatttcagagcattgaccgtagtatacccccggtcgtgtagcggtgaa

SEQ ID NO: 80883 - DNA, 120 bp, Homo sapiens
  misc_feature: 494 for SV(C|O) and mtDNA
tgggggaggttatatgggtttaatagtttttttaatttatttagggggaatgatggttgtctttggatatactacagcgatggctattgaggagtatcctgaggcatgggggtcaggggt

SEQ ID NO: 80884 - DNA, 120 bp, Homo sapiens
  misc_feature: 494 for SV(C|O) and mtDNA
tgaacccccctccccatacccaaccccctggtcaacctcaacctaggcctcctatttattctagccacctctagcctagccgtttactcaatcctctgatcagggtgagcatcaaactca

SEQ ID NO: 80885 - DNA, 120 bp, Homo sapiens
  misc_feature: 494 for SV(C|O) and mtDNA
gcgaataggcttccggctgtcaggcgtttaatggggtttagtagggtggggttattttcgttaatgttagtaagggtggggaagcgaggttgacctgttagggtgagaagaattattcga

SEQ ID NO: 80886 - DNA, 120 bp, Homo sapiens; identical to SEQ ID NO: 60006
  misc_feature: 494 for SV(C|O) and mtDNA

SEQ ID NO: 80887 - DNA, 120 bp, Homo sapiens
  misc_feature: 494 for SV(C|O) and mtDNA
atcacctcccattccgataaaatcaccttccacccttactacacaatcaaagacgccctcggcttacttctcttccttctctccttaatgacattaacactattctcaccagacctccta

SEQ ID NO: 80888 - DNA, 120 bp, Homo sapiens; identical to SEQ ID NO: 62903
  misc_feature: 494 for SV(C|O) and mtDNA

SEQ ID NO: 80889 - DNA, 120 bp, Homo sapiens
  misc_feature: 494 for SV(C|O) and mtDNA
taaacacaaactaccacctacctccctcaccaaagcccataaaaataaaaaattataacaaaccctgagaaccaaaatgaacgaaaatctgttcgcttcattcattgcccccacaatcct

SEQ ID NO: 80890 - DNA, 120 bp, Homo sapiens
  misc_feature: 494 for SV(C|O) and mtDNA
caatcttatccatcatagcaggcagttgaggtggattaaaccaaacccagctacgcaaaatcttagcatactcctcaattacccacataggatgaataatagcagttctaccgtacaacc

SEQ ID NO: 80891 - DNA, 120 bp, Homo sapiens
  misc_feature: 494 for SV(C|O) and mtDNA
atcatagcaggcagttgaggtggattaaaccaaacccagctacgcaaaatcttagcatactcctcaattacccacataggatgaataatagcagttctaccgtacaaccctaacataacc

SEQ ID NO: 80892 - DNA, 120 bp, Homo sapiens
  misc_feature: 494 for SV(C|O) and mtDNA
gccatcatgacccttggccataatatgatttatctccacactagcagagaccaaccgaacccccttcgaccttgccgaaggagagtccgaactagtctcaggcttcaacatcgaatacgc

SEQ ID NO: 80893 - DNA, 120 bp, Homo sapiens; identical to SEQ ID NO: 58743
  misc_feature: 494 for SV(C|O) and mtDNA

SEQ ID NO: 80894 - DNA, 120 bp, Homo sapiens
  misc_feature: 494 for SV(C|O) and mtDNA
ccaaaattctccgtgccacctatcacaccccatcctaaagtaaggtcagctaaataagctatcgggcccataccccgaaaatgttggttatacccttcccgtactaattaatcccctggc

SEQ ID NO: 80895 - DNA, 120 bp, Homo sapiens
  misc_feature: 494 for SV(C|O) and mtDNA
gaggtgtatgagttggtcgtagcggaatcgggggtatgctgttcgaattcataagaacagggaggttagaagtagggtcttggtgacaaaatatgttgtgtagagttcaggggagagtgc

SEQ ID NO: 80896 - DNA, 120 bp, Homo sapiens
  misc_feature: 494 for SV(C|O) and mtDNA
aacaaccccctaggaatcacctcccattccgataaaatcaccttccacccttactacacaatcaaagacgccctcggcttacttctcttccttctctccttaatgacattaacactattc

SEQ ID NO: 80897 - DNA, 120 bp, Homo sapiens
  misc_feature: 494 for SV(C|O) and mtDNA
ctctgattactcctgccatcatgacccttggccataatatgatttatctccacactagcagagaccaaccgaacccccttcgaccttgccgaaggagagtccgaactagtctcaggcttc

SEQ ID NO: 80898 - DNA, 120 bp, Homo sapiens
  misc_feature: 494 for SV(C|O) and mtDNA
ctctccttcataaattattcagcttcctacactattaaagtttaccacaaccaccaccccatcatactctttcacccacagcaccaatcctacctccatcgctaaccccactaaaacact

SEQ ID NO: 80899 - DNA, 120 bp, Homo sapiens
  misc_feature: 494 for SV(C|O) and mtDNA
ctccctgacaagcgcctatagcactcgaataattcttctcaccctaacaggtcaacctcgcttccccacccttactaacattaacgaaaataaccccaccctactaaaccccattaaacg

SEQ ID NO: 80900 - DNA, 120 bp, Homo sapiens
  misc_feature: 494 for SV(C|O) and mtDNA
ctatttcaaagatttttaggggaattaattctaggacgatgggcatgaaactgtggtttgctccacagatttcagagcattgaccgtagtatacccccggtcgtgtagcggtgaaagtgg

SEQ ID NO: 80901 - DNA, 120 bp, Homo sapiens
  misc_feature: 494 for SV(C|O) and mtDNA
atacgggccctatttcaaagatttttaggggaattaattctaggacgatgggcatgaaactgtggtttgctccacagatttcagagcattgaccgtagtatacccccggtcgtgtagcgg

SEQ ID NO: 80902 - DNA, 120 bp, Homo sapiens
  misc_feature: 494 for SV(C|O) and mtDNA
cacagcagtcctacttctcctatctctcccagtcctagctgctggcatcactatactactaacagaccgcaacctcaacaccaccttcttcgaccccgccggaggaggagaccccattct

SEQ ID NO: 80903 - DNA, 120 bp, Homo sapiens
  misc_feature: 494 for SV(C|O) and mtDNA
aggtcaacctcgcttccccacccttactaacattaacgaaaataaccccaccctactaaaccccattaaacgcctgacagccggaagcctattcgcaggatttctcattactaacaacat

SEQ ID NO: 80904 - DNA, 120 bp, Homo sapiens
  misc_feature: 493 for SV(C|O) and mtDNA
tttattgctaaaggttaatcactgctgtttcccgtgggggtgtggctaggctaagcgttttgagctgcattgctgcgtgcttgatgcttgtcccttttgatcgtggtgatttagagggtg

SEQ ID NO: 80905 - DNA, 120 bp, Homo sapiens
  misc_feature: 493 for SV(C|O) and mtDNA
aaccctgagaaccaaaatgaacgaaaatctgttcgcttcattcattgcccccacaatcctaggcctacccgccgcagtactgatcattctatttccccctctattgatccccacctccaa

SEQ ID NO: 80906 - DNA, 120 bp, Homo sapiens
  misc_feature: 493 for SV(C|O) and mtDNA
ttcaaagccatactatttatgtgctccgggtccatcatccacaaccttaacaatgaacaagatatccgaaaaataggaggactactcaaaaccatacctctcacttcaacctccctcacc

SEQ ID NO: 80907 - DNA, 120 bp, Homo sapiens
  misc_feature: 493 for SV(C|O) and mtDNA
gaaatctgtggagcaaaccacagtttcatgcccatcgtcctagaattaattcccctaaaaatctttgaaatagggcccgtatttaccctatagcaccccctctaccccctctagagccca

SEQ ID NO: 80908 - DNA, 120 bp, Homo sapiens
  misc_feature: 493 for SV(C|O) and mtDNA
tgaaatctgtggagcaaaccacagtttcatgcccatcgtcctagaattaattcccctaaaaatctttgaaatagggcccgtatttaccctatagcaccccctctaccccctctagagccc

SEQ ID NO: 80909 - DNA, 120 bp, Homo sapiens
  misc_feature: 493 for SV(C|O) and mtDNA
tctgaaatctgtggagcaaaccacagtttcatgcccatcgtcctagaattaattcccctaaaaatctttgaaatagggcccgtatttaccctatagcaccccctctaccccctctagagc

SEQ ID NO: 80910 - DNA, 120 bp, Homo sapiens
  misc_feature: 493 for SV(C|O) and mtDNA
tcgcctaggaggtctggtgagaatagtgttaatgtcattaaggagagaaggaagagaagtaagccgagggcgtctttgattgtgtagtaagggtggaaggtgattttatcggaatgggag

SEQ ID NO: 80911 - DNA, 120 bp, Homo sapiens
  misc_feature: 493 for SV(C|O) and mtDNA
ctcacaggtttctactccaaagaccacatcatcgaaaccgcaaacatatcatacacaaacgcctgagccctatctattactctcatcgctacctccctgacaagcgcctatagcactcga

SEQ ID NO: 80912 - DNA, 120 bp, Homo sapiens
  misc_feature: 493 for SV(C|O) and mtDNA
taggaatcacctcccattccgataaaatcaccttccacccttactacacaatcaaagacgccctcggcttacttctcttccttctctccttaatgacattaacactattctcaccagacc

SEQ ID NO: 80913 - DNA, 120 bp, Homo sapiens
  misc_feature: 493 for SV(C|O) and mtDNA
catcgctacctccctgacaagcgcctatagcactcgaataattcttctcaccctaacaggtcaacctcgcttccccacccttactaacattaacgaaaataaccccaccctactaaaccc

SEQ ID NO: 80914 - DNA, 120 bp, Homo sapiens
  misc_feature: 493 for SV(C|O) and mtDNA
gggggaggttatatgggtttaatagtttttttaatttatttagggggaatgatggttgtctttggatatactacagcgatggctattgaggagtatcctgaggcatgggggtcaggggtt

SEQ ID NO: 80915 - DNA, 120 bp, Homo sapiens
  misc_feature: 493 for SV(C|O) and mtDNA
ggctgtcaggcgtttaatggggtttagtagggtggggttattttcgttaatgttagtaagggtggggaagcgaggttgacctgttagggtgagaagaattattcgagtgctataggcgct

SEQ ID NO: 80916 - DNA, 120 bp, Homo sapiens
  misc_feature: 493 for SV(C|O) and mtDNA
ctctccacccttatcacaacacaagaacacctctgattactcctgccatcatgacccttggccataatatgatttatctccacactagcagagaccaaccgaacccccttcgaccttgcc

SEQ ID NO: 80917 - DNA, 120 bp, Homo sapiens
  misc_feature: 493 for SV(C|O) and mtDNA
ggattaaaccaaacccagctacgcaaaatcttagcatactcctcaattacccacataggatgaataatagcagttctaccgtacaaccctaacataaccattcttaatttaactatttat

SEQ ID NO: 80918 - DNA, 120 bp, Homo sapiens
  misc_feature: 493 for SV(C|O) and mtDNA
ctcatcgccctcccatccctgcgcatcctttacataacagacgaggtcaacgatccctcccttaccatcaaatcaattggccaccaatggtactgaacctacgagtacaccgactacggc

SEQ ID NO: 80919 - DNA, 120 bp, Homo sapiens
  misc_feature: 493 for SV(C|O) and mtDNA
agaacgtggttactagcacagagagttctcccagtaggttaatagtggggggtaaggcgaggttagcgaggcttgctagaagtcatcaaaaagctattagtgggagtagagtttgaagtc

SEQ ID NO: 80920 - DNA, 120 bp, Homo sapiens
  misc_feature: 493 for SV(C|O) and mtDNA
cttgccgaaggagagtccgaactagtctcaggcttcaacatcgaatacgccgcaggccccttcgccttattcttcatagccgaatacacaaacattattataataaacaccctcaccact

SEQ ID NO: 80921 - DNA, 120 bp, Homo sapiens
  misc_feature: 493 for SV(C|O) and mtDNA
ccacccttatcacaacacaagaacacctctgattactcctgccatcatgacccttggccataatatgatttatctccacactagcagagaccaaccgaacccccttcgaccttgccgaag

SEQ ID NO: 80922 - DNA, 120 bp, Homo sapiens
  misc_feature: 493 for SV(C|O) and mtDNA
aggtgtatgagttggtcgtagcggaatcgggggtatgctgttcgaattcataagaacagggaggttagaagtagggtcttggtgacaaaatatgttgtgtagagttcaggggagagtgcg

SEQ ID NO: 80923 - DNA, 120 bp, Homo sapiens
  misc_feature: 493 for SV(C|O) and mtDNA
acccaaccccctggtcaacctcaacctaggcctcctatttattctagccacctctagcctagccgtttactcaatcctctgatcagggtgagcatcaaactcaaactacgccctgatcgg

SEQ ID NO: 80924 - DNA, 120 bp, Homo sapiens
  misc_feature: 493 for SV(C|O) and mtDNA
atcttatccatcatagcaggcagttgaggtggattaaaccaaacccagctacgcaaaatcttagcatactcctcaattacccacataggatgaataatagcagttctaccgtacaaccct

SEQ ID NO: 80925 - DNA, 120 bp, Homo sapiens
  misc_feature: 492 for SV(C|O) and mtDNA
ttatccatcatagcaggcagttgaggtggattaaaccaaacccagctacgcaaaatcttagcatactcctcaattacccacataggatgaataatagcagttctaccgtacaaccctaac

SEQ ID NO: 80926 - DNA, 120 bp, Homo sapiens; identical to SEQ ID NO: 62578
  misc_feature: 492 for SV(C|O) and mtDNA

SEQ ID NO: 80927 - DNA, 120 bp, Homo sapiens
  misc_feature: 492 for SV(C|O) and mtDNA
tattagctcttagtaagattacacatgcaagcatccccgttccagtgagttcaccctctaaatcaccacgatcaaaagggacaagcatcaagcacgcagcaatgcagctcaaaacgctta

SEQ ID NO: 80928 - DNA, 120 bp, Homo sapiens
  misc_feature: 492 for SV(C|O) and mtDNA
tatagggtaaatacgggccctatttcaaagatttttaggggaattaattctaggacgatgggcatgaaactgtggtttgctccacagatttcagagcattgaccgtagtatacccccggt

SEQ ID NO: 80929 - DNA, 120 bp, Homo sapiens
  misc_feature: 492 for SV(C|O) and mtDNA
gtcaggcgtttaatggggtttagtagggtggggttattttcgttaatgttagtaagggtggggaagcgaggttgacctgttagggtgagaagaattattcgagtgctataggcgcttgtc

SEQ ID NO: 80930 - DNA, 120 bp, Homo sapiens
  misc_feature: 492 for SV(C|O) and mtDNA
gtagactgttcaacctgttcctgctccggcctccactatagcagatgcgagcaggagtaggagagagggaggtaagagtcagaagcttatgttgtttatgcggggaaacgccatatcggg

SEQ ID NO: 80931 - DNA, 120 bp, Homo sapiens
  misc_feature: 492 for SV(C|O) and mtDNA
cgcccttacacaaaatgacatcaaaaaaatcgtagccttctccacttcaagtcaactaggactcataatagttacaatcggcatcaaccaaccacacctagcattcctgcacatctgtac

SEQ ID NO: 80932 - DNA, 120 bp, Homo sapiens
  misc_feature: 492 for SV(C|O) and mtDNA
gggaactagtcagttgccaaagcctccgattatgatgggtattactatgaagaagattattacaaatgcatgggctgtgacgataacgttgtagatgtggtcgttacctagaaggttgcc

SEQ ID NO: 80933 - DNA, 120 bp, Homo sapiens
  misc_feature: 492 for SV(C|O) and mtDNA
cggctgtcaggcgtttaatggggtttagtagggtggggttattttcgttaatgttagtaagggtggggaagcgaggttgacctgttagggtgagaagaattattcgagtgctataggcgc

SEQ ID NO: 80934 - DNA, 120 bp, Homo sapiens
  misc_feature: 492 for SV(C|O) and mtDNA
gcctaggaggtctggtgagaatagtgttaatgtcattaaggagagaaggaagagaagtaagccgagggcgtctttgattgtgtagtaagggtggaaggtgattttatcggaatgggaggt

SEQ ID NO: 80935 - DNA, 120 bp, Homo sapiens
  misc_feature: 492 for SV(C|O) and mtDNA
cttggtatgtgctttctcgtgttacatcgcgccatcattggtatatggttagtgtgttggttagtaggcctagtatgaggagcgttatggagtggaagtgaaatcacatggctaggccgg

SEQ ID NO: 80936 - DNA, 120 bp, Homo sapiens
  misc_feature: 492 for SV(C|O) and mtDNA
ccaaagcctccgattatgatgggtattactatgaagaagattattacaaatgcatgggctgtgacgataacgttgtagatgtggtcgttacctagaaggttgcctggctggcccagctcg

SEQ ID NO: 80937 - DNA, 120 bp, Homo sapiens; identical to SEQ ID NO: 62410
  misc_feature: 492 for SV(C|O) and mtDNA

SEQ ID NO: 80938 - DNA, 120 bp, Homo sapiens; identical to SEQ ID NO: 61312
  misc_feature: 492 for SV(C|O) and mtDNA

SEQ ID NO: 80939 - DNA, 120 bp, Homo sapiens
  misc_feature: 492 for SV(C|O) and mtDNA
atctgtggagcaaaccacagtttcatgcccatcgtcctagaattaattcccctaaaaatctttgaaatagggcccgtatttaccctatagcaccccctctaccccctctagagcccactg

SEQ ID NO: 80940 - DNA, 120 bp, Homo sapiens
  misc_feature: 491 for SV(C|O) and mtDNA
ttatggccaagggtcatgatggcaggagtaatcagaggtgttcttgtgttgtgataagggtggagaggttaaaggagccacttattagtaatgttgatagtagaatgatggctagggtga

SEQ ID NO: 80941 - DNA, 120 bp, Homo sapiens
  misc_feature: 491 for SV(C|O) and mtDNA
cttatccatcatagcaggcagttgaggtggattaaaccaaacccagctacgcaaaatcttagcatactcctcaattacccacataggatgaataatagcagttctaccgtacaaccctaa

SEQ ID NO: 80942 - DNA, 120 bp, Homo sapiens
  misc_feature: 491 for SV(C|O) and mtDNA
tcgctacctccctgacaagcgcctatagcactcgaataattcttctcaccctaacaggtcaacctcgcttccccacccttactaacattaacgaaaataaccccaccctactaaacccca

SEQ ID NO: 80943 - DNA, 120 bp, Homo sapiens
  misc_feature: 491 for SV(C|O) and mtDNA
aatatcccgcacaagagtgctactctcctcgctccgggcccataacacttgggggtagctaaagtgaactgtatccgacatctggttcctacttcagggccataaagcctaaatagccca

SEQ ID NO: 80944 - DNA, 120 bp, Homo sapiens
  misc_feature: 491 for SV(C|O) and mtDNA
tcactttcctaggacttctaacagccctagacctcaactacctaaccaacaaacttaaaataaaatccccactatgcacattttatttctccaacatactcggattctaccctaccatca

SEQ ID NO: 80945 - DNA, 120 bp, Homo sapiens
  misc_feature: 491 for SV(C|O) and mtDNA
tctgattactcctgccatcatgacccttggccataatatgatttatctccacactagcagagaccaaccgaacccccttcgaccttgccgaaggagagtccgaactagtctcaggcttca

SEQ ID NO: 80946 - DNA, 120 bp, Homo sapiens; identical to SEQ ID NO: 60060
  misc_feature: 491 for SV(C|O) and mtDNA

SEQ ID NO: 80947 - DNA, 120 bp, Homo sapiens
  misc_feature: 491 for SV(C|O) and mtDNA
tccggctgtcaggcgtttaatggggtttagtagggtggggttattttcgttaatgttagtaagggtggggaagcgaggttgacctgttagggtgagaagaattattcgagtgctataggc

SEQ ID NO: 80948 - DNA, 120 bp, Homo sapiens
  misc_feature: 491 for SV(C|O) and mtDNA
tcataggaggtgtatgagttggtcgtagcggaatcgggggtatgctgttcgaattcataagaacagggaggttagaagtagggtcttggtgacaaaatatgttgtgtagagttcagggga

SEQ ID NO: 80949 - DNA, 120 bp, Homo sapiens
  misc_feature: 491 for SV(C|O) and mtDNA
acaggtcaacctcgcttccccacccttactaacattaacgaaaataaccccaccctactaaaccccattaaacgcctgacagccggaagcctattcgcaggatttctcattactaacaac

SEQ ID NO: 80950 - DNA, 120 bp, Homo sapiens
  misc_feature: 491 for SV(C|O) and mtDNA
ctttcctaggacttctaacagccctagacctcaactacctaaccaacaaacttaaaataaaatccccactatgcacattttatttctccaacatactcggattctaccctaccatcacac

SEQ ID NO: 80951 - DNA, 120 bp, Homo sapiens
  misc_feature: 491 for SV(C|O) and mtDNA
cttcaaagccatactatttatgtgctccgggtccatcatccacaaccttaacaatgaacaagatatccgaaaaataggaggactactcaaaaccatacctctcacttcaacctccctcac

SEQ ID NO: 80952 - DNA, 120 bp, Homo sapiens; identical to SEQ ID NO: 60517
  misc_feature: 491 for SV(C|O) and mtDNA

SEQ ID NO: 80953 - DNA, 120 bp, Homo sapiens
  misc_feature: 491 for SV(C|O) and mtDNA
ggtgagcatcaaactcaaactacgccctgatcggcgcactgcgagcagtagcccaaacaatctcatatgaagtcaccctagccatcattctactatcaacattactaataagtggctcct

SEQ ID NO: 80954 - DNA, 120 bp, Homo sapiens
  misc_feature: 491 for SV(C|O) and mtDNA
ggggaactagtcagttgccaaagcctccgattatgatgggtattactatgaagaagattattacaaatgcatgggctgtgacgataacgttgtagatgtggtcgttacctagaaggttgc

SEQ ID NO: 80955 - DNA, 120 bp, Homo sapiens; identical to SEQ ID NO: 58181
  misc_feature: 491 for SV(C|O) and mtDNA

SEQ ID NO: 80956 - DNA, 120 bp, Homo sapiens
  misc_feature: 491 for SV(C|O) and mtDNA
ggaactagtcagttgccaaagcctccgattatgatgggtattactatgaagaagattattacaaatgcatgggctgtgacgataacgttgtagatgtggtcgttacctagaaggttgcct

SEQ ID NO: 80957 - DNA, 120 bp, Homo sapiens
  misc_feature: 491 for SV(C|O) and mtDNA
gcggtcacacgattaacccaagtcaatagaagccggcgtaaagagtgttttagatcaccccctccccaataaagctaaaactcacctgagttgtaaaaaactccagctgacacaaaatag

SEQ ID NO: 80958 - DNA, 120 bp, Homo sapiens
  misc_feature: 491 for SV(C|O) and mtDNA
gatcagaggattgagtaaacggctaggctagaggtggctagaataaataggaggcctaggttgaggttgaccagggggttgggtatggggaggggggttcatagtagaagagcgatggtg

SEQ ID NO: 80959 - DNA, 120 bp, Homo sapiens; identical to SEQ ID NO: 61497
  misc_feature: 491 for SV(C|O) and mtDNA

SEQ ID NO: 80960 - DNA, 120 bp, Homo sapiens
  misc_feature: 491 for SV(C|O) and mtDNA
acaaaccctgagaaccaaaatgaacgaaaatctgttcgcttcattcattgcccccacaatcctaggcctacccgccgcagtactgatcattctatttccccctctattgatccccacctc

SEQ ID NO: 80961 - DNA, 120 bp, Homo sapiens
  misc_feature: 491 for SV(C|O) and mtDNA
gacgaaaataccaaatgcatggagagctcccgtgagtggttaatagggtgatagacctgtgatccatcgtgatgtcttatttaaggggaacgtgtgggctatttaggctttatggccctg

SEQ ID NO: 80962 - DNA, 120 bp, Homo sapiens
  misc_feature: 491 for SV(C|O) and mtDNA
ctattagctcttagtaagattacacatgcaagcatccccgttccagtgagttcaccctctaaatcaccacgatcaaaagggacaagcatcaagcacgcagcaatgcagctcaaaacgctt

SEQ ID NO: 80963 - DNA, 120 bp, Homo sapiens
  misc_feature: 491 for SV(C|O) and mtDNA
cctaggaggtctggtgagaatagtgttaatgtcattaaggagagaaggaagagaagtaagccgagggcgtctttgattgtgtagtaagggtggaaggtgattttatcggaatgggaggtg

SEQ ID NO: 80964 - DNA, 120 bp, Homo sapiens
  misc_feature: 491 for SV(C|O) and mtDNA
caaagccatactatttatgtgctccgggtccatcatccacaaccttaacaatgaacaagatatccgaaaaataggaggactactcaaaaccatacctctcacttcaacctccctcaccat

SEQ ID NO: 80965 - DNA, 120 bp, Homo sapiens
  misc_feature: 491 for SV(C|O) and mtDNA
attactcctgccatcatgacccttggccataatatgatttatctccacactagcagagaccaaccgaacccccttcgaccttgccgaaggagagtccgaactagtctcaggcttcaacat

SEQ ID NO: 80966 - DNA, 120 bp, Homo sapiens; identical to SEQ ID NO: 58940
  misc_feature: 491 for SV(C|O) and mtDNA

SEQ ID NO: 80967 - DNA, 120 bp, Homo sapiens
  misc_feature: 491 for SV(C|O) and mtDNA
aattcttctcaccctaacaggtcaacctcgcttccccacccttactaacattaacgaaaataaccccaccctactaaaccccattaaacgcctgacagccggaagcctattcgcaggatt

SEQ ID NO: 80968 - DNA, 120 bp, Homo sapiens
  misc_feature: 490 for SV(C|O) and mtDNA
tttcctaggacttctaacagccctagacctcaactacctaaccaacaaacttaaaataaaatccccactatgcacattttatttctccaacatactcggattctaccctaccatcacaca

SEQ ID NO: 80969 - DNA, 120 bp, Homo sapiens
  misc_feature: 490 for SV(C|O) and mtDNA
gattactcctgccatcatgacccttggccataatatgatttatctccacactagcagagaccaaccgaacccccttcgaccttgccgaaggagagtccgaactagtctcaggcttcaaca

SEQ ID NO: 80970 - DNA, 120 bp, Homo sapiens
  misc_feature: 490 for SV(C|O) and mtDNA
tgttcaacctgttcctgctccggcctccactatagcagatgcgagcaggagtaggagagagggaggtaagagtcagaagcttatgttgtttatgcggggaaacgccatatcgggggcacc

SEQ ID NO: 80971 - DNA, 120 bp, Homo sapiens
  misc_feature: 490 for SV(C|O) and mtDNA
actttcctaggacttctaacagccctagacctcaactacctaaccaacaaacttaaaataaaatccccactatgcacattttatttctccaacatactcggattctaccctaccatcaca

SEQ ID NO: 80972 - DNA, 120 bp, Homo sapiens
  misc_feature: 490 for SV(C|O) and mtDNA
tcaaagccatactatttatgtgctccgggtccatcatccacaaccttaacaatgaacaagatatccgaaaaataggaggactactcaaaaccatacctctcacttcaacctccctcacca

SEQ ID NO: 80973 - DNA, 120 bp, Homo sapiens; identical to SEQ ID NO: 57961
  misc_feature: 490 for SV(C|O) and mtDNA

SEQ ID NO: 80974 - DNA, 120 bp, Homo sapiens
  misc_feature: 490 for SV(C|O) and mtDNA
tgctctgaaatctgtggagcaaaccacagtttcatgcccatcgtcctagaattaattcccctaaaaatctttgaaatagggcccgtatttaccctatagcaccccctctaccccctctag

SEQ ID NO: 80975 - DNA, 120 bp, Homo sapiens
  misc_feature: 490 for SV(C|O) and mtDNA
tgccatcatgacccttggccataatatgatttatctccacactagcagagaccaaccgaacccccttcgaccttgccgaaggagagtccgaactagtctcaggcttcaacatcgaatacg

SEQ ID NO: 80976 - DNA, 120 bp, Homo sapiens
  misc_feature: 490 for SV(C|O) and mtDNA
cccggtcgtgtagcggtgaaagtggtttggtttagacgtccgggaattgcatctgtttttaagcctaatgtggggacagctcatgagtgcaagacgtcttgtgatgtaattattatacga

SEQ ID NO: 80977 - DNA, 120 bp, Homo sapiens; identical to SEQ ID NO: 62718
  misc_feature: 490 for SV(C|O) and mtDNA

SEQ ID NO: 80978 - DNA, 120 bp, Homo sapiens; identical to SEQ ID NO: 62454
  misc_feature: 490 for SV(C|O) and mtDNA

SEQ ID NO: 80979 - DNA, 120 bp, Homo sapiens
  misc_feature: 490 for SV(C|O) and mtDNA
tcactctctcaatcttatccatcatagcaggcagttgaggtggattaaaccaaacccagctacgcaaaatcttagcatactcctcaattacccacataggatgaataatagcagttctac

SEQ ID NO: 80980 - DNA, 120 bp, Homo sapiens; identical to SEQ ID NO: 59215
  misc_feature: 490 for SV(C|O) and mtDNA

SEQ ID NO: 80981 - DNA, 120 bp, Homo sapiens
  misc_feature: 490 for SV(C|O) and mtDNA
ctgtggagcaaaccacagtttcatgcccatcgtcctagaattaattcccctaaaaatctttgaaatagggcccgtatttaccctatagcaccccctctaccccctctagagcccactgta

SEQ ID NO: 80982 - DNA, 120 bp, Homo sapiens
  misc_feature: 490 for SV(C|O) and mtDNA
gtcactttcctaggacttctaacagccctagacctcaactacctaaccaacaaacttaaaataaaatccccactatgcacattttatttctccaacatactcggattctaccctaccatc

SEQ ID NO: 80983 - DNA, 120 bp, Homo sapiens
  misc_feature: 490 for SV(C|O) and mtDNA
cgctgtcactttcctaggacttctaacagccctagacctcaactacctaaccaacaaacttaaaataaaatccccactatgcacattttatttctccaacatactcggattctaccctac

SEQ ID NO: 80984 - DNA, 120 bp, Homo sapiens
  misc_feature: 490 for SV(C|O) and mtDNA
ggtcgcctaggaggtctggtgagaatagtgttaatgtcattaaggagagaaggaagagaagtaagccgagggcgtctttgattgtgtagtaagggtggaaggtgattttatcggaatggg

SEQ ID NO: 80985 - DNA, 120 bp, Homo sapiens
  misc_feature: 490 for SV(C|O) and mtDNA
ctgaaatctgtggagcaaaccacagtttcatgcccatcgtcctagaattaattcccctaaaaatctttgaaatagggcccgtatttaccctatagcaccccctctaccccctctagagcc

SEQ ID NO: 80986 - DNA, 120 bp, Homo sapiens
  misc_feature: 490 for SV(C|O) and mtDNA
ccaaacaatctcatatgaagtcaccctagccatcattctactatcaacattactaataagtggctcctttaacctctccacccttatcacaacacaagaacacctctgattactcctgcc

SEQ ID NO: 80987 - DNA, 120 bp, Homo sapiens
  misc_feature: 490 for SV(C|O) and mtDNA
atgaacccccctccccatacccaaccccctggtcaacctcaacctaggcctcctatttattctagccacctctagcctagccgtttactcaatcctctgatcagggtgagcatcaaactc

SEQ ID NO: 80988 - DNA, 120 bp, Homo sapiens
  misc_feature: 490 for SV(C|O) and mtDNA
gaataattcttctcaccctaacaggtcaacctcgcttccccacccttactaacattaacgaaaataaccccaccctactaaaccccattaaacgcctgacagccggaagcctattcgcag

SEQ ID NO: 80989 - DNA, 120 bp, Homo sapiens
  misc_feature: 490 for SV(C|O) and mtDNA
ctactctcctcgctccgggcccataacacttgggggtagctaaagtgaactgtatccgacatctggttcctacttcagggccataaagcctaaatagcccacacgttccccttaaataag

SEQ ID NO: 80990 - DNA, 120 bp, Homo sapiens; identical to SEQ ID NO: 56387
  misc_feature: 490 for SV(C|O) and mtDNA

SEQ ID NO: 80991 - DNA, 120 bp, Homo sapiens
  misc_feature: 490 for SV(C|O) and mtDNA
ctcaccctaacaggtcaacctcgcttccccacccttactaacattaacgaaaataaccccaccctactaaaccccattaaacgcctgacagccggaagcctattcgcaggatttctcatt

SEQ ID NO: 80992 - DNA, 120 bp, Homo sapiens
  misc_feature: 489 for SV(C|O) and mtDNA
ctgattactcctgccatcatgacccttggccataatatgatttatctccacactagcagagaccaaccgaacccccttcgaccttgccgaaggagagtccgaactagtctcaggcttcaa

SEQ ID NO: 80993 - DNA, 120 bp, Homo sapiens
  misc_feature: 489 for SV(C|O) and mtDNA
gctactctcctcgctccgggcccataacacttgggggtagctaaagtgaactgtatccgacatctggttcctacttcagggccataaagcctaaatagcccacacgttccccttaaataa

SEQ ID NO: 80994 - DNA, 120 bp, Homo sapiens
  misc_feature: 489 for SV(C|O) and mtDNA
ttattgctaaaggttaatcactgctgtttcccgtgggggtgtggctaggctaagcgttttgagctgcattgctgcgtgcttgatgcttgtcccttttgatcgtggtgatttagagggtga

SEQ ID NO: 80995 - DNA, 120 bp, Homo sapiens
  misc_feature: 489 for SV(C|O) and mtDNA
ttactcctgccatcatgacccttggccataatatgatttatctccacactagcagagaccaaccgaacccccttcgaccttgccgaaggagagtccgaactagtctcaggcttcaacatc

SEQ ID NO: 80996 - DNA, 120 bp, Homo sapiens
  misc_feature: 489 for SV(C|O) and mtDNA
gagtgctactctcctcgctccgggcccataacacttgggggtagctaaagtgaactgtatccgacatctggttcctacttcagggccataaagcctaaatagcccacacgttccccttaa

SEQ ID NO: 80997 - DNA, 120 bp, Homo sapiens
  misc_feature: 489 for SV(C|O) and mtDNA
tatccatcatagcaggcagttgaggtggattaaaccaaacccagctacgcaaaatcttagcatactcctcaattacccacataggatgaataatagcagttctaccgtacaaccctaaca

SEQ ID NO: 80998 - DNA, 120 bp, Homo sapiens; identical to SEQ ID NO: 62500
  misc_feature: 489 for SV(C|O) and mtDNA

SEQ ID NO: 80999 - DNA, 120 bp, Homo sapiens
  misc_feature: 489 for SV(C|O) and mtDNA
cctgccatcatgacccttggccataatatgatttatctccacactagcagagaccaaccgaacccccttcgaccttgccgaaggagagtccgaactagtctcaggcttcaacatcgaata

SEQ ID NO: 81000 - DNA, 120 bp, Homo sapiens; identical to SEQ ID NO: 59260
  misc_feature: 489 for SV(C|O) and mtDNA

SEQ ID NO: 81001 - DNA, 120 bp, Homo sapiens
  misc_feature: 489 for SV(C|O) and mtDNA
taacctctacttctacctacgcctaatctactccacctcaatcacactactccccatatctaacaacgtaaaaataaaatgacagtttgaacatacaaaacccaccccattcctccccac

SEQ ID NO: 81002 - DNA, 120 bp, Homo sapiens; identical to SEQ ID NO: 61301
  misc_feature: 489 for SV(C|O) and mtDNA

SEQ ID NO: 81003 - DNA, 120 bp, Homo sapiens
  misc_feature: 489 for SV(C|O) and mtDNA
gtgagcatcaaactcaaactacgccctgatcggcgcactgcgagcagtagcccaaacaatctcatatgaagtcaccctagccatcattctactatcaacattactaataagtggctcctt

SEQ ID NO: 81004 - DNA, 120 bp, Homo sapiens
  misc_feature: 489 for SV(C|O) and mtDNA
ctctcaatcttatccatcatagcaggcagttgaggtggattaaaccaaacccagctacgcaaaatcttagcatactcctcaattacccacataggatgaataatagcagttctaccgtac

SEQ ID NO: 81005 - DNA, 120 bp, Homo sapiens; identical to SEQ ID NO: 61386
  misc_feature: 489 for SV(C|O) and mtDNA

SEQ ID NO: 81006 - DNA, 120 bp, Homo sapiens; identical to SEQ ID NO: 60575
  misc_feature: 489 for SV(C|O) and mtDNA

SEQ ID NO: 81007 - DNA, 120 bp, Homo sapiens
  misc_feature: 489 for SV(C|O) and mtDNA
ggggaggttatatgggtttaatagtttttttaatttatttagggggaatgatggttgtctttggatatactacagcgatggctattgaggagtatcctgaggcatgggggtcaggggttg

SEQ ID NO: 81008 - DNA, 120 bp, Homo sapiens
  misc_feature: 489 for SV(C|O) and mtDNA
aacctcgcttccccacccttactaacattaacgaaaataaccccaccctactaaaccccattaaacgcctgacagccggaagcctattcgcaggatttctcattactaacaacatttccc

SEQ ID NO: 81009 - DNA, 120 bp, Homo sapiens
  misc_feature: 489 for SV(C|O) and mtDNA
ggaggtgtatgagttggtcgtagcggaatcgggggtatgctgttcgaattcataagaacagggaggttagaagtagggtcttggtgacaaaatatgttgtgtagagttcaggggagagtg

SEQ ID NO: 81010 - DNA, 120 bp, Homo sapiens
  misc_feature: 489 for SV(C|O) and mtDNA
aaatatgttgtgtagagttcaggggagagtgcgtcatatgttgttcctaggaagattgtagtggtgagggtgtttattataataatgtttgtgtattcggctatgaagaataaggcgaag

SEQ ID NO: 81011 - DNA, 120 bp, Homo sapiens
  misc_feature: 489 for SV(C|O) and mtDNA
ctcccttaccatcaaatcaattggccaccaatggtactgaacctacgagtacaccgactacggcggactaatcttcaactcctacatacttcccccattattcctagaaccaggcgacct

SEQ ID NO: 81012 - DNA, 120 bp, Homo sapiens
  misc_feature: 489 for SV(C|O) and mtDNA
ccaaccccctggtcaacctcaacctaggcctcctatttattctagccacctctagcctagccgtttactcaatcctctgatcagggtgagcatcaaactcaaactacgccctgatcggcg

SEQ ID NO: 81013 - DNA, 120 bp, Homo sapiens; identical to SEQ ID NO: 56650
  misc_feature: 489 for SV(C|O) and mtDNA

SEQ ID NO: 81014 - DNA, 120 bp, Homo sapiens; identical to SEQ ID NO: 62296
  misc_feature: 489 for SV(C|O) and mtDNA

SEQ ID NO: 81015 - DNA, 120 bp, Homo sapiens
  misc_feature: 488 for SV(C|O) and mtDNA
taacaggtcaacctcgcttccccacccttactaacattaacgaaaataaccccaccctactaaaccccattaaacgcctgacagccggaagcctattcgcaggatttctcattactaaca

SEQ ID NO: 81016 - DNA, 120 bp, Homo sapiens
  misc_feature: 488 for SV(C|O) and mtDNA
tatcccgcacaagagtgctactctcctcgctccgggcccataacacttgggggtagctaaagtgaactgtatccgacatctggttcctacttcagggccataaagcctaaatagcccaca

SEQ ID NO: 81017 - DNA, 120 bp, Homo sapiens
  misc_feature: 488 for SV(C|O) and mtDNA
ctaacagaccgcaacctcaacaccaccttcttcgaccccgccggaggaggagaccccattctataccaacacctattctgatttttcggtcaccctgaagtttatattcttatcctacca

SEQ ID NO: 81018 - DNA, 120 bp, Homo sapiens
  misc_feature: 488 for SV(C|O) and mtDNA
ctaggaaagtgacagcgagggctgtgagttttaggtagagggggattgttgtttggaagggggatgcgggggaaatgttgttagtaatgagaaatcctgcgaataggcttccggctgtca

SEQ ID NO: 81019 - DNA, 120 bp, Homo sapiens
  misc_feature: 488 for SV(C|O) and mtDNA
ataggaggtgtatgagttggtcgtagcggaatcgggggtatgctgttcgaattcataagaacagggaggttagaagtagggtcttggtgacaaaatatgttgtgtagagttcaggggaga

SEQ ID NO: 81020 - DNA, 120 bp, Homo sapiens; identical to SEQ ID NO: 58801
  misc_feature: 488 for SV(C|O) and mtDNA

SEQ ID NO: 81021 - DNA, 120 bp, Homo sapiens
  misc_feature: 488 for SV(C|O) and mtDNA
tcagaggattgagtaaacggctaggctagaggtggctagaataaataggaggcctaggttgaggttgaccagggggttgggtatggggaggggggttcatagtagaagagcgatggtgag

SEQ ID NO: 81022 - DNA, 120 bp, Homo sapiens
  misc_feature: 488 for SV(C|O) and mtDNA
taacctttagcaataaacgaaagtttaactaagctatactaaccccagggttggtcaatttcgtgccagccaccgcggtcacacgattaacccaagtcaatagaagccggcgtaaagagt

SEQ ID NO: 81023 - DNA, 120 bp, Homo sapiens
  misc_feature: 488 for SV(C|O) and mtDNA
ctaacaggtcaacctcgcttccccacccttactaacattaacgaaaataaccccaccctactaaaccccattaaacgcctgacagccggaagcctattcgcaggatttctcattactaac

SEQ ID NO: 81024 - DNA, 120 bp, Homo sapiens
  misc_feature: 488 for SV(C|O) and mtDNA
atatcccgcacaagagtgctactctcctcgctccgggcccataacacttgggggtagctaaagtgaactgtatccgacatctggttcctacttcagggccataaagcctaaatagcccac

SEQ ID NO: 81025 - DNA, 120 bp, Homo sapiens; identical to SEQ ID NO: 56378
  misc_feature: 488 for SV(C|O) and mtDNA

SEQ ID NO: 81026 - DNA, 120 bp, Homo sapiens
  misc_feature: 488 for SV(C|O) and mtDNA
gaccttgccgaaggagagtccgaactagtctcaggcttcaacatcgaatacgccgcaggccccttcgccttattcttcatagccgaatacacaaacattattataataaacaccctcacc

SEQ ID NO: 81027 - DNA, 120 bp, Homo sapiens
  misc_feature: 488 for SV(C|O) and mtDNA
ggagattattccgaagcctggtaggataagaatataaacttcagggtgaccgaaaaatcagaataggtgttggtatagaatggggtctcctcctccggcggggtcgaagaaggtggtgtt

SEQ ID NO: 81028 - DNA, 120 bp, Homo sapiens; identical to SEQ ID NO: 57419
  misc_feature: 488 for SV(C|O) and mtDNA

SEQ ID NO: 81029 - DNA, 120 bp, Homo sapiens; identical to SEQ ID NO: 57881
  misc_feature: 488 for SV(C|O) and mtDNA

SEQ ID NO: 81030 - DNA, 120 bp, Homo sapiens
  misc_feature: 488 for SV(C|O) and mtDNA
cttatcacaacacaagaacacctctgattactcctgccatcatgacccttggccataatatgatttatctccacactagcagagaccaaccgaacccccttcgaccttgccgaaggagag

SEQ ID NO: 81031 - DNA, 120 bp, Homo sapiens
  misc_feature: 488 for SV(C|O) and mtDNA
cgcctaggaggtctggtgagaatagtgttaatgtcattaaggagagaaggaagagaagtaagccgagggcgtctttgattgtgtagtaagggtggaaggtgattttatcggaatgggagg

SEQ ID NO: 81032 - DNA, 120 bp, Homo sapiens; identical to SEQ ID NO: 57822
  misc_feature: 488 for SV(C|O) and mtDNA

SEQ ID NO: 81033 - DNA, 120 bp, Homo sapiens
  misc_feature: 488 for SV(C|O) and mtDNA
attcttctcaccctaacaggtcaacctcgcttccccacccttactaacattaacgaaaataaccccaccctactaaaccccattaaacgcctgacagccggaagcctattcgcaggattt

SEQ ID NO: 81034 - DNA, 120 bp, Homo sapiens
  misc_feature: 488 for SV(C|O) and mtDNA
aacaaaccctgagaaccaaaatgaacgaaaatctgttcgcttcattcattgcccccacaatcctaggcctacccgccgcagtactgatcattctatttccccctctattgatccccacct

SEQ ID NO: 81035 - DNA, 120 bp, Homo sapiens; identical to SEQ ID NO: 59704
  misc_feature: 488 for SV(C|O) and mtDNA

SEQ ID NO: 81036 - DNA, 120 bp, Homo sapiens; identical to SEQ ID NO: 59109
  misc_feature: 487 for SV(C|O) and mtDNA

SEQ ID NO: 81037 - DNA, 120 bp, Homo sapiens; identical to SEQ ID NO: 62355
  misc_feature: 487 for SV(C|O) and mtDNA

SEQ ID NO: 81038 - DNA, 120 bp, Homo sapiens
  misc_feature: 487 for SV(C|O) and mtDNA
tgggagattattccgaagcctggtaggataagaatataaacttcagggtgaccgaaaaatcagaataggtgttggtatagaatggggtctcctcctccggcggggtcgaagaaggtggtg

SEQ ID NO: 81039 - DNA, 120 bp, Homo sapiens
  misc_feature: 487 for SV(C|O) and mtDNA
tcgaccttgccgaaggagagtccgaactagtctcaggcttcaacatcgaatacgccgcaggccccttcgccttattcttcatagccgaatacacaaacattattataataaacaccctca

SEQ ID NO: 81040 - DNA, 120 bp, Homo sapiens
  misc_feature: 487 for SV(C|O) and mtDNA
tctcaccctaacaggtcaacctcgcttccccacccttactaacattaacgaaaataaccccaccctactaaaccccattaaacgcctgacagccggaagcctattcgcaggatttctcat

SEQ ID NO: 81041 - DNA, 120 bp, Homo sapiens
  misc_feature: 487 for SV(C|O) and mtDNA
gctctgaaatctgtggagcaaaccacagtttcatgcccatcgtcctagaattaattcccctaaaaatctttgaaatagggcccgtatttaccctatagcaccccctctaccccctctaga

SEQ ID NO: 81042 - DNA, 120 bp, Homo sapiens
  misc_feature: 487 for SV(C|O) and mtDNA
tcgtaagaaggcctagataggggattgtgcggtgtgtgatggtagggtagaatccgagtatgttggagaaataaaatgtgcatagtggggattttattttaagtttgttggttaggtagt

SEQ ID NO: 81043 - DNA, 120 bp, Homo sapiens
  misc_feature: 487 for SV(C|O) and mtDNA
tcctgccatcatgacccttggccataatatgatttatctccacactagcagagaccaaccgaacccccttcgaccttgccgaaggagagtccgaactagtctcaggcttcaacatcgaat

SEQ ID NO: 81044 - DNA, 120 bp, Homo sapiens
  misc_feature: 487 for SV(C|O) and mtDNA
tcaccctgatcagaggattgagtaaacggctaggctagaggtggctagaataaataggaggcctaggttgaggttgaccagggggttgggtatggggaggggggttcatagtagaagagc

SEQ ID NO: 81045 - DNA, 120 bp, Homo sapiens
  misc_feature: 487 for SV(C|O) and mtDNA
gattaaaccaaacccagctacgcaaaatcttagcatactcctcaattacccacataggatgaataatagcagttctaccgtacaaccctaacataaccattcttaatttaactatttata

SEQ ID NO: 81046 - DNA, 120 bp, Homo sapiens
  misc_feature: 487 for SV(C|O) and mtDNA
tagactgttcaacctgttcctgctccggcctccactatagcagatgcgagcaggagtaggagagagggaggtaagagtcagaagcttatgttgtttatgcggggaaacgccatatcgggg

SEQ ID NO: 81047 - DNA, 120 bp, Homo sapiens
  misc_feature: 487 for SV(C|O) and mtDNA
acagcagtcctacttctcctatctctcccagtcctagctgctggcatcactatactactaacagaccgcaacctcaacaccaccttcttcgaccccgccggaggaggagaccccattcta

SEQ ID NO: 81048 - DNA, 120 bp, Homo sapiens
  misc_feature: 487 for SV(C|O) and mtDNA
tactcctgccatcatgacccttggccataatatgatttatctccacactagcagagaccaaccgaacccccttcgaccttgccgaaggagagtccgaactagtctcaggcttcaacatcg

SEQ ID NO: 81049 - DNA, 120 bp, Homo sapiens
  misc_feature: 487 for SV(C|O) and mtDNA
atcccgcacaagagtgctactctcctcgctccgggcccataacacttgggggtagctaaagtgaactgtatccgacatctggttcctacttcagggccataaagcctaaatagcccacac

SEQ ID NO: 81050 - DNA, 120 bp, Homo sapiens
  misc_feature: 487 for SV(C|O) and mtDNA
ccttgccgaaggagagtccgaactagtctcaggcttcaacatcgaatacgccgcaggccccttcgccttattcttcatagccgaatacacaaacattattataataaacaccctcaccac

SEQ ID NO: 81051 - DNA, 120 bp, Homo sapiens
  misc_feature: 487 for SV(C|O) and mtDNA
gtcaacctcgcttccccacccttactaacattaacgaaaataaccccaccctactaaaccccattaaacgcctgacagccggaagcctattcgcaggatttctcattactaacaacattt

SEQ ID NO: 81052 - DNA, 120 bp, Homo sapiens
  misc_feature: 487 for SV(C|O) and mtDNA
aatcttatccatcatagcaggcagttgaggtggattaaaccaaacccagctacgcaaaatcttagcatactcctcaattacccacataggatgaataatagcagttctaccgtacaaccc

SEQ ID NO: 81053 - DNA, 120 bp, Homo sapiens
  misc_feature: 487 for SV(C|O) and mtDNA
cttaacctctacttctacctacgcctaatctactccacctcaatcacactactccccatatctaacaacgtaaaaataaaatgacagtttgaacatacaaaacccaccccattcctcccc

SEQ ID NO: 81054 - DNA, 120 bp, Homo sapiens
  misc_feature: 487 for SV(C|O) and mtDNA
caatatcccgcacaagagtgctactctcctcgctccgggcccataacacttgggggtagctaaagtgaactgtatccgacatctggttcctacttcagggccataaagcctaaatagccc

SEQ ID NO: 81055 - DNA, 120 bp, Homo sapiens; identical to SEQ ID NO: 56322
  misc_feature: 487 for SV(C|O) and mtDNA

SEQ ID NO: 81056 - DNA, 120 bp, Homo sapiens
  misc_feature: 487 for SV(C|O) and mtDNA
gaacgtggttactagcacagagagttctcccagtaggttaatagtggggggtaaggcgaggttagcgaggcttgctagaagtcatcaaaaagctattagtgggagtagagtttgaagtcc

SEQ ID NO: 81057 - DNA, 120 bp, Homo sapiens
  misc_feature: 487 for SV(C|O) and mtDNA
gctatagggtaaatacgggccctatttcaaagatttttaggggaattaattctaggacgatgggcatgaaactgtggtttgctccacagatttcagagcattgaccgtagtatacccccg

SEQ ID NO: 81058 - DNA, 120 bp, Homo sapiens; identical to SEQ ID NO: 60550
  misc_feature: 487 for SV(C|O) and mtDNA

SEQ ID NO: 81059 - DNA, 120 bp, Homo sapiens
  misc_feature: 487 for SV(C|O) and mtDNA
agggtgagcatcaaactcaaactacgccctgatcggcgcactgcgagcagtagcccaaacaatctcatatgaagtcaccctagccatcattctactatcaacattactaataagtggctc

SEQ ID NO: 81060 - DNA, 120 bp, Homo sapiens; identical to SEQ ID NO: 58512
  misc_feature: 487 for SV(C|O) and mtDNA

SEQ ID NO: 81061 - DNA, 120 bp, Homo sapiens
  misc_feature: 487 for SV(C|O) and mtDNA
cacccttatcacaacacaagaacacctctgattactcctgccatcatgacccttggccataatatgatttatctccacactagcagagaccaaccgaacccccttcgaccttgccgaagg

SEQ ID NO: 81062 - DNA, 120 bp, Homo sapiens
  misc_feature: 487 for SV(C|O) and mtDNA
cctcactctctcaatcttatccatcatagcaggcagttgaggtggattaaaccaaacccagctacgcaaaatcttagcatactcctcaattacccacataggatgaataatagcagttct

SEQ ID NO: 81063 - DNA, 120 bp, Homo sapiens
  misc_feature: 487 for SV(C|O) and mtDNA
ccctatttcaaagatttttaggggaattaattctaggacgatgggcatgaaactgtggtttgctccacagatttcagagcattgaccgtagtatacccccggtcgtgtagcggtgaaagt

SEQ ID NO: 81064 - DNA, 120 bp, Homo sapiens
  misc_feature: 487 for SV(C|O) and mtDNA
agactgttcaacctgttcctgctccggcctccactatagcagatgcgagcaggagtaggagagagggaggtaagagtcagaagcttatgttgtttatgcggggaaacgccatatcggggg

SEQ ID NO: 81065 - DNA, 120 bp, Homo sapiens
  misc_feature: 487 for SV(C|O) and mtDNA
accctaacaggtcaacctcgcttccccacccttactaacattaacgaaaataaccccaccctactaaaccccattaaacgcctgacagccggaagcctattcgcaggatttctcattact

SEQ ID NO: 81066 - DNA, 120 bp, Homo sapiens
  misc_feature: 487 for SV(C|O) and mtDNA
acaaccccctaggaatcacctcccattccgataaaatcaccttccacccttactacacaatcaaagacgccctcggcttacttctcttccttctctccttaatgacattaacactattct

SEQ ID NO: 81067 - DNA, 120 bp, Homo sapiens
  misc_feature: 486 for SV(C|O) and mtDNA
ggccctatttcaaagatttttaggggaattaattctaggacgatgggcatgaaactgtggtttgctccacagatttcagagcattgaccgtagtatacccccggtcgtgtagcggtgaaa

SEQ ID NO: 81068 - DNA, 120 bp, Homo sapiens
  misc_feature: 486 for SV(C|O) and mtDNA
ttctcaccctaacaggtcaacctcgcttccccacccttactaacattaacgaaaataaccccaccctactaaaccccattaaacgcctgacagccggaagcctattcgcaggatttctca

SEQ ID NO: 81069 - DNA, 120 bp, Homo sapiens; identical to SEQ ID NO: 56657
  misc_feature: 486 for SV(C|O) and mtDNA

SEQ ID NO: 81070 - DNA, 120 bp, Homo sapiens
  misc_feature: 486 for SV(C|O) and mtDNA
cccctaggaatcacctcccattccgataaaatcaccttccacccttactacacaatcaaagacgccctcggcttacttctcttccttctctccttaatgacattaacactattctcacca

SEQ ID NO: 81071 - DNA, 120 bp, Homo sapiens; identical to SEQ ID NO: 62714
  misc_feature: 486 for SV(C|O) and mtDNA

SEQ ID NO: 81072 - DNA, 120 bp, Homo sapiens
  misc_feature: 486 for SV(C|O) and mtDNA
tactctcctcgctccgggcccataacacttgggggtagctaaagtgaactgtatccgacatctggttcctacttcagggccataaagcctaaatagcccacacgttccccttaaataaga

SEQ ID NO: 81073 - DNA, 120 bp, Homo sapiens
  misc_feature: 486 for SV(C|O) and mtDNA
cctaggaatcacctcccattccgataaaatcaccttccacccttactacacaatcaaagacgccctcggcttacttctcttccttctctccttaatgacattaacactattctcaccaga

SEQ ID NO: 81074 - DNA, 120 bp, Homo sapiens
  misc_feature: 486 for SV(C|O) and mtDNA
tctccacccttatcacaacacaagaacacctctgattactcctgccatcatgacccttggccataatatgatttatctccacactagcagagaccaaccgaacccccttcgaccttgccg

SEQ ID NO: 81075 - DNA, 120 bp, Homo sapiens
  misc_feature: 486 for SV(C|O) and mtDNA
tctattagctcttagtaagattacacatgcaagcatccccgttccagtgagttcaccctctaaatcaccacgatcaaaagggacaagcatcaagcacgcagcaatgcagctcaaaacgct

SEQ ID NO: 81076 - DNA, 120 bp, Homo sapiens
  misc_feature: 486 for SV(C|O) and mtDNA
tcgtttattgctaaaggttaatcactgctgtttcccgtgggggtgtggctaggctaagcgttttgagctgcattgctgcgtgcttgatgcttgtcccttttgatcgtggtgatttagagg

SEQ ID NO: 81077 - DNA, 120 bp, Homo sapiens
  misc_feature: 486 for SV(C|O) and mtDNA
actcctgccatcatgacccttggccataatatgatttatctccacactagcagagaccaaccgaacccccttcgaccttgccgaaggagagtccgaactagtctcaggcttcaacatcga

SEQ ID NO: 81078 - DNA, 120 bp, Homo sapiens
  misc_feature: 486 for SV(C|O) and mtDNA
tacgggccctatttcaaagatttttaggggaattaattctaggacgatgggcatgaaactgtggtttgctccacagatttcagagcattgaccgtagtatacccccggtcgtgtagcggt

SEQ ID NO: 81079 - DNA, 120 bp, Homo sapiens
  misc_feature: 486 for SV(C|O) and mtDNA
cgaccttgccgaaggagagtccgaactagtctcaggcttcaacatcgaatacgccgcaggccccttcgccttattcttcatagccgaatacacaaacattattataataaacaccctcac

SEQ ID NO: 81080 - DNA, 120 bp, Homo sapiens
  misc_feature: 486 for SV(C|O) and mtDNA
actctcctcgctccgggcccataacacttgggggtagctaaagtgaactgtatccgacatctggttcctacttcagggccataaagcctaaatagcccacacgttccccttaaataagac

SEQ ID NO: 81081 - DNA, 120 bp, Homo sapiens
  misc_feature: 486 for SV(C|O) and mtDNA
ggtcacacgattaacccaagtcaatagaagccggcgtaaagagtgttttagatcaccccctccccaataaagctaaaactcacctgagttgtaaaaaactccagctgacacaaaatagac

SEQ ID NO: 81082 - DNA, 120 bp, Homo sapiens
  misc_feature: 486 for SV(C|O) and mtDNA
gctgtcaggcgtttaatggggtttagtagggtggggttattttcgttaatgttagtaagggtggggaagcgaggttgacctgttagggtgagaagaattattcgagtgctataggcgctt

SEQ ID NO: 81083 - DNA, 120 bp, Homo sapiens
  misc_feature: 486 for SV(C|O) and mtDNA
cccaaacaatctcatatgaagtcaccctagccatcattctactatcaacattactaataagtggctcctttaacctctccacccttatcacaacacaagaacacctctgattactcctgc

SEQ ID NO: 81084 - DNA, 120 bp, Homo sapiens
  misc_feature: 486 for SV(C|O) and mtDNA
accaaaatgaacgaaaatctgttcgcttcattcattgcccccacaatcctaggcctacccgccgcagtactgatcattctatttccccctctattgatccccacctccaaatatctcatc

SEQ ID NO: 81085 - DNA, 120 bp, Homo sapiens
  misc_feature: 486 for SV(C|O) and mtDNA
cacttgggggtagctaaagtgaactgtatccgacatctggttcctacttcagggccataaagcctaaatagcccacacgttccccttaaataagacatcacgatggatcacaggtctatc

SEQ ID NO: 81086 - DNA, 120 bp, Homo sapiens
  misc_feature: 486 for SV(C|O) and mtDNA
ccctaggaatcacctcccattccgataaaatcaccttccacccttactacacaatcaaagacgccctcggcttacttctcttccttctctccttaatgacattaacactattctcaccag

SEQ ID NO: 81087 - DNA, 120 bp, Homo sapiens
  misc_feature: 486 for SV(C|O) and mtDNA
ctctgaaatctgtggagcaaaccacagtttcatgcccatcgtcctagaattaattcccctaaaaatctttgaaatagggcccgtatttaccctatagcaccccctctaccccctctagag

SEQ ID NO: 81088 - DNA, 120 bp, Homo sapiens
  misc_feature: 486 for SV(C|O) and mtDNA
cgtttattgctaaaggttaatcactgctgtttcccgtgggggtgtggctaggctaagcgttttgagctgcattgctgcgtgcttgatgcttgtcccttttgatcgtggtgatttagaggg

SEQ ID NO: 81089 - DNA, 120 bp, Homo sapiens
  misc_feature: 486 for SV(C|O) and mtDNA
cctcacaggtttctactccaaagaccacatcatcgaaaccgcaaacatatcatacacaaacgcctgagccctatctattactctcatcgctacctccctgacaagcgcctatagcactcg

SEQ ID NO: 81090 - DNA, 120 bp, Homo sapiens
  misc_feature: 486 for SV(C|O) and mtDNA
cctgatcagaggattgagtaaacggctaggctagaggtggctagaataaataggaggcctaggttgaggttgaccagggggttgggtatggggaggggggttcatagtagaagagcgatg

SEQ ID NO: 81091 - DNA, 120 bp, Homo sapiens; identical to SEQ ID NO: 58759
  misc_feature: 486 for SV(C|O) and mtDNA

SEQ ID NO: 81092 - DNA, 120 bp, Homo sapiens
  misc_feature: 486 for SV(C|O) and mtDNA
atgggagattattccgaagcctggtaggataagaatataaacttcagggtgaccgaaaaatcagaataggtgttggtatagaatggggtctcctcctccggcggggtcgaagaaggtggt

SEQ ID NO: 81093 - DNA, 120 bp, Homo sapiens; identical to SEQ ID NO: 58942
  misc_feature: 486 for SV(C|O) and mtDNA

SEQ ID NO: 81094 - DNA, 120 bp, Homo sapiens
  misc_feature: 485 for SV(C|O) and mtDNA
cctaacaggtcaacctcgcttccccacccttactaacattaacgaaaataaccccaccctactaaaccccattaaacgcctgacagccggaagcctattcgcaggatttctcattactaa

SEQ ID NO: 81095 - DNA, 120 bp, Homo sapiens; identical to SEQ ID NO: 62511
  misc_feature: 485 for SV(C|O) and mtDNA

SEQ ID NO: 81096 - DNA, 120 bp, Homo sapiens
  misc_feature: 485 for SV(C|O) and mtDNA
aaccccctaggaatcacctcccattccgataaaatcaccttccacccttactacacaatcaaagacgccctcggcttacttctcttccttctctccttaatgacattaacactattctca

SEQ ID NO: 81097 - DNA, 120 bp, Homo sapiens
  misc_feature: 485 for SV(C|O) and mtDNA
cagaggattgagtaaacggctaggctagaggtggctagaataaataggaggcctaggttgaggttgaccagggggttgggtatggggaggggggttcatagtagaagagcgatggtgaga

SEQ ID NO: 81098 - DNA, 120 bp, Homo sapiens
  misc_feature: 485 for SV(C|O) and mtDNA
ctaggaggtctggtgagaatagtgttaatgtcattaaggagagaaggaagagaagtaagccgagggcgtctttgattgtgtagtaagggtggaaggtgattttatcggaatgggaggtga

SEQ ID NO: 81099 - DNA, 120 bp, Homo sapiens; identical to SEQ ID NO: 59604
  misc_feature: 485 for SV(C|O) and mtDNA

SEQ ID NO: 81100 - DNA, 120 bp, Homo sapiens
  misc_feature: 485 for SV(C|O) and mtDNA
taacaaaccctgagaaccaaaatgaacgaaaatctgttcgcttcattcattgcccccacaatcctaggcctacccgccgcagtactgatcattctatttccccctctattgatccccacc

SEQ ID NO: 81101 - DNA, 120 bp, Homo sapiens
  misc_feature: 485 for SV(C|O) and mtDNA
cctctccttcataaattattcagcttcctacactattaaagtttaccacaaccaccaccccatcatactctttcacccacagcaccaatcctacctccatcgctaaccccactaaaacac

SEQ ID NO: 81102 - DNA, 120 bp, Homo sapiens; identical to SEQ ID NO: 63014
  misc_feature: 485 for SV(C|O) and mtDNA

SEQ ID NO: 81103 - DNA, 120 bp, Homo sapiens; identical to SEQ ID NO: 62497
  misc_feature: 485 for SV(C|O) and mtDNA

SEQ ID NO: 81104 - DNA, 120 bp, Homo sapiens; identical to SEQ ID NO: 61309
  misc_feature: 485 for SV(C|O) and mtDNA

SEQ ID NO: 81105 - DNA, 120 bp, Homo sapiens; identical to SEQ ID NO: 58999
  misc_feature: 485 for SV(C|O) and mtDNA

SEQ ID NO: 81106 - DNA, 120 bp, Homo sapiens
  misc_feature: 485 for SV(C|O) and mtDNA
atatgggagattattccgaagcctggtaggataagaatataaacttcagggtgaccgaaaaatcagaataggtgttggtatagaatggggtctcctcctccggcggggtcgaagaaggtg

SEQ ID NO: 81107 - DNA, 120 bp, Homo sapiens
  misc_feature: 484 for SV(C|O) and mtDNA
ctcctgccatcatgacccttggccataatatgatttatctccacactagcagagaccaaccgaacccccttcgaccttgccgaaggagagtccgaactagtctcaggcttcaacatcgaa

SEQ ID NO: 81108 - DNA, 120 bp, Homo sapiens
  misc_feature: 484 for SV(C|O) and mtDNA
ttcctaggacttctaacagccctagacctcaactacctaaccaacaaacttaaaataaaatccccactatgcacattttatttctccaacatactcggattctaccctaccatcacacac

SEQ ID NO: 81109 - DNA, 120 bp, Homo sapiens
  misc_feature: 484 for SV(C|O) and mtDNA
aacctctacttctacctacgcctaatctactccacctcaatcacactactccccatatctaacaacgtaaaaataaaatgacagtttgaacatacaaaacccaccccattcctccccaca

SEQ ID NO: 81110 - DNA, 120 bp, Homo sapiens
  misc_feature: 484 for SV(C|O) and mtDNA
tagaggagacacctgctaggtgtaaggagaagatggttaggtctacggaggctccagggtgggagtagttccctgctaagggagggtagactgttcaacctgttcctgctccggcctcca

SEQ ID NO: 81111 - DNA, 120 bp, Homo sapiens
  misc_feature: 484 for SV(C|O) and mtDNA
tgctactctcctcgctccgggcccataacacttgggggtagctaaagtgaactgtatccgacatctggttcctacttcagggccataaagcctaaatagcccacacgttccccttaaata

SEQ ID NO: 81112 - DNA, 120 bp, Homo sapiens
  misc_feature: 484 for SV(C|O) and mtDNA
tcttctcaccctaacaggtcaacctcgcttccccacccttactaacattaacgaaaataaccccaccctactaaaccccattaaacgcctgacagccggaagcctattcgcaggatttct

SEQ ID NO: 81113 - DNA, 120 bp, Homo sapiens
  misc_feature: 484 for SV(C|O) and mtDNA
cccattcgtataataattacatcacaagacgtcttgcactcatgagctgtccccacattaggcttaaaaacagatgcaattcccggacgtctaaaccaaaccactttcaccgctacacga

SEQ ID NO: 81114 - DNA, 120 bp, Homo sapiens
  misc_feature: 484 for SV(C|O) and mtDNA
taggatgaataatagcagttctaccgtacaaccctaacataaccattcttaatttaactatttatattatcctaactactaccgcattcctactactcaacttaaactccagcaccacga

SEQ ID NO: 81115 - DNA, 120 bp, Homo sapiens
  misc_feature: 484 for SV(C|O) and mtDNA
atcagaggattgagtaaacggctaggctagaggtggctagaataaataggaggcctaggttgaggttgaccagggggttgggtatggggaggggggttcatagtagaagagcgatggtga

SEQ ID NO: 81116 - DNA, 120 bp, Homo sapiens
  misc_feature: 484 for SV(C|O) and mtDNA
ctaggaatcacctcccattccgataaaatcaccttccacccttactacacaatcaaagacgccctcggcttacttctcttccttctctccttaatgacattaacactattctcaccagac

SEQ ID NO: 81117 - DNA, 120 bp, Homo sapiens
  misc_feature: 484 for SV(C|O) and mtDNA
aaaattctccgtgccacctatcacaccccatcctaaagtaaggtcagctaaataagctatcgggcccataccccgaaaatgttggttatacccttcccgtactaattaatcccctggccc

SEQ ID NO: 81118 - DNA, 120 bp, Homo sapiens
  misc_feature: 484 for SV(C|O) and mtDNA
cgctaaccggctttttgcccaaatgggccattatcgaagaattcacaaaaaacaatagcctcatcatccccaccatcatagccaccatcaccctccttaacctctacttctacctacgcc

SEQ ID NO: 81119 - DNA, 120 bp, Homo sapiens
  misc_feature: 484 for SV(C|O) and mtDNA
ccgctaaccggctttttgcccaaatgggccattatcgaagaattcacaaaaaacaatagcctcatcatccccaccatcatagccaccatcaccctccttaacctctacttctacctacgc

SEQ ID NO: 81120 - DNA, 120 bp, Homo sapiens; identical to SEQ ID NO: 62686
  misc_feature: 484 for SV(C|O) and mtDNA

SEQ ID NO: 81121 - DNA, 120 bp, Homo sapiens
  misc_feature: 484 for SV(C|O) and mtDNA
cccgctaaccggctttttgcccaaatgggccattatcgaagaattcacaaaaaacaatagcctcatcatccccaccatcatagccaccatcaccctccttaacctctacttctacctacg

SEQ ID NO: 81122 - DNA, 120 bp, Homo sapiens
  misc_feature: 484 for SV(C|O) and mtDNA
actctctcaatcttatccatcatagcaggcagttgaggtggattaaaccaaacccagctacgcaaaatcttagcatactcctcaattacccacataggatgaataatagcagttctaccg

SEQ ID NO: 81123 - DNA, 120 bp, Homo sapiens
  misc_feature: 484 for SV(C|O) and mtDNA
acgttgacaatcgagtagtactcccgattgaagcccccattcgtataataattacatcacaagacgtcttgcactcatgagctgtccccacattaggcttaaaaacagatgcaattcccg

SEQ ID NO: 81124 - DNA, 120 bp, Homo sapiens; identical to SEQ ID NO: 62403
  misc_feature: 484 for SV(C|O) and mtDNA

SEQ ID NO: 81125 - DNA, 120 bp, Homo sapiens; identical to SEQ ID NO: 60119
  misc_feature: 484 for SV(C|O) and mtDNA

SEQ ID NO: 81126 - DNA, 120 bp, Homo sapiens
  misc_feature: 483 for SV(C|O) and mtDNA
tttagtggggttagcgatggaggtaggattggtgctgtgggtgaaagagtatgatggggtggtggttgtggtaaactttaatagtgtaggaagctgaataatttatgaaggagaggggtc

SEQ ID NO: 81127 - DNA, 120 bp, Homo sapiens
  misc_feature: 483 for SV(C|O) and mtDNA
caaaatgaacgaaaatctgttcgcttcattcattgcccccacaatcctaggcctacccgccgcagtactgatcattctatttccccctctattgatccccacctccaaatatctcatcaa

SEQ ID NO: 81128 - DNA, 120 bp, Homo sapiens
  misc_feature: 483 for SV(C|O) and mtDNA
ttcttctcaccctaacaggtcaacctcgcttccccacccttactaacattaacgaaaataaccccaccctactaaaccccattaaacgcctgacagccggaagcctattcgcaggatttc

SEQ ID NO: 81129 - DNA, 120 bp, Homo sapiens; identical to SEQ ID NO: 62909
  misc_feature: 483 for SV(C|O) and mtDNA

SEQ ID NO: 81130 - DNA, 120 bp, Homo sapiens
  misc_feature: 483 for SV(C|O) and mtDNA
ttaacctctacttctacctacgcctaatctactccacctcaatcacactactccccatatctaacaacgtaaaaataaaatgacagtttgaacatacaaaacccaccccattcctcccca

SEQ ID NO: 81131 - DNA, 120 bp, Homo sapiens
  misc_feature: 483 for SV(C|O) and mtDNA
accttgccgaaggagagtccgaactagtctcaggcttcaacatcgaatacgccgcaggccccttcgccttattcttcatagccgaatacacaaacattattataataaacaccctcacca

SEQ ID NO: 81132 - DNA, 120 bp, Homo sapiens
  misc_feature: 483 for SV(C|O) and mtDNA
ccaaaatgaacgaaaatctgttcgcttcattcattgcccccacaatcctaggcctacccgccgcagtactgatcattctatttccccctctattgatccccacctccaaatatctcatca

SEQ ID NO: 81133 - DNA, 120 bp, Homo sapiens
  misc_feature: 483 for SV(C|O) and mtDNA
tgatcagaggattgagtaaacggctaggctagaggtggctagaataaataggaggcctaggttgaggttgaccagggggttgggtatggggaggggggttcatagtagaagagcgatggt

SEQ ID NO: 81134 - DNA, 120 bp, Homo sapiens
  misc_feature: 483 for SV(C|O) and mtDNA
gaacacctctgattactcctgccatcatgacccttggccataatatgatttatctccacactagcagagaccaaccgaacccccttcgaccttgccgaaggagagtccgaactagtctca

SEQ ID NO: 81135 - DNA, 120 bp, Homo sapiens
  misc_feature: 483 for SV(C|O) and mtDNA
tctgtggagcaaaccacagtttcatgcccatcgtcctagaattaattcccctaaaaatctttgaaatagggcccgtatttaccctatagcaccccctctaccccctctagagcccactgt

SEQ ID NO: 81136 - DNA, 120 bp, Homo sapiens; identical to SEQ ID NO: 55804
  misc_feature: 483 for SV(C|O) and mtDNA

SEQ ID NO: 81137 - DNA, 120 bp, Homo sapiens
  misc_feature: 483 for SV(C|O) and mtDNA
tctctcaatcttatccatcatagcaggcagttgaggtggattaaaccaaacccagctacgcaaaatcttagcatactcctcaattacccacataggatgaataatagcagttctaccgta

SEQ ID NO: 81138 - DNA, 120 bp, Homo sapiens
  misc_feature: 483 for SV(C|O) and mtDNA
tcctcactctctcaatcttatccatcatagcaggcagttgaggtggattaaaccaaacccagctacgcaaaatcttagcatactcctcaattacccacataggatgaataatagcagttc

SEQ ID NO: 81139 - DNA, 120 bp, Homo sapiens
  misc_feature: 483 for SV(C|O) and mtDNA
tcatcgccctcccatccctgcgcatcctttacataacagacgaggtcaacgatccctcccttaccatcaaatcaattggccaccaatggtactgaacctacgagtacaccgactacggcg

SEQ ID NO: 81140 - DNA, 120 bp, Homo sapiens
  misc_feature: 483 for SV(C|O) and mtDNA
tatggttttgagtagtcctcctatttttcggatatcttgttcattgttaaggttgtggatgatggacccggagcacataaatagtatggctttgaagaaggcgtgggtacagatgtgcag

SEQ ID NO: 81141 - DNA, 120 bp, Homo sapiens
  misc_feature: 483 for SV(C|O) and mtDNA
ctttctattagctcttagtaagattacacatgcaagcatccccgttccagtgagttcaccctctaaatcaccacgatcaaaagggacaagcatcaagcacgcagcaatgcagctcaaaac

SEQ ID NO: 81142 - DNA, 120 bp, Homo sapiens
  misc_feature: 483 for SV(C|O) and mtDNA
ccccgctaaccggctttttgcccaaatgggccattatcgaagaattcacaaaaaacaatagcctcatcatccccaccatcatagccaccatcaccctccttaacctctacttctacctac

SEQ ID NO: 81143 - DNA, 120 bp, Homo sapiens
  misc_feature: 483 for SV(C|O) and mtDNA
ggtagctaaagtgaactgtatccgacatctggttcctacttcagggccataaagcctaaatagcccacacgttccccttaaataagacatcacgatggatcacaggtctatcaccctatt

SEQ ID NO: 81144 - DNA, 120 bp, Homo sapiens; identical to SEQ ID NO: 58214
  misc_feature: 483 for SV(C|O) and mtDNA

SEQ ID NO: 81145 - DNA, 120 bp, Homo sapiens
  misc_feature: 483 for SV(C|O) and mtDNA
gctaaccggctttttgcccaaatgggccattatcgaagaattcacaaaaaacaatagcctcatcatccccaccatcatagccaccatcaccctccttaacctctacttctacctacgcct

SEQ ID NO: 81146 - DNA, 120 bp, Homo sapiens; identical to SEQ ID NO: 61141
  misc_feature: 483 for SV(C|O) and mtDNA

SEQ ID NO: 81147 - DNA, 120 bp, Homo sapiens
  misc_feature: 483 for SV(C|O) and mtDNA
cttctcaccctaacaggtcaacctcgcttccccacccttactaacattaacgaaaataaccccaccctactaaaccccattaaacgcctgacagccggaagcctattcgcaggatttctc

SEQ ID NO: 81148 - DNA, 120 bp, Homo sapiens
  misc_feature: 483 for SV(C|O) and mtDNA
cttcttcaaagccatactatttatgtgctccgggtccatcatccacaaccttaacaatgaacaagatatccgaaaaataggaggactactcaaaaccatacctctcacttcaacctccct

SEQ ID NO: 81149 - DNA, 120 bp, Homo sapiens
  misc_feature: 483 for SV(C|O) and mtDNA
ataggatgaataatagcagttctaccgtacaaccctaacataaccattcttaatttaactatttatattatcctaactactaccgcattcctactactcaacttaaactccagcaccacg

SEQ ID NO: 81150 - DNA, 120 bp, Homo sapiens; identical to SEQ ID NO: 59152
  misc_feature: 483 for SV(C|O) and mtDNA

SEQ ID NO: 81151 - DNA, 120 bp, Homo sapiens
  misc_feature: 483 for SV(C|O) and mtDNA
atccatcatagcaggcagttgaggtggattaaaccaaacccagctacgcaaaatcttagcatactcctcaattacccacataggatgaataatagcagttctaccgtacaaccctaacat

SEQ ID NO: 81152 - DNA, 120 bp, Homo sapiens
  misc_feature: 483 for SV(C|O) and mtDNA
aagaacacctctgattactcctgccatcatgacccttggccataatatgatttatctccacactagcagagaccaaccgaacccccttcgaccttgccgaaggagagtccgaactagtct

SEQ ID NO: 81153 - DNA, 120 bp, Homo sapiens
  misc_feature: 482 for SV(C|O) and mtDNA
tttctattagctcttagtaagattacacatgcaagcatccccgttccagtgagttcaccctctaaatcaccacgatcaaaagggacaagcatcaagcacgcagcaatgcagctcaaaacg

SEQ ID NO: 81154 - DNA, 120 bp, Homo sapiens
  misc_feature: 482 for SV(C|O) and mtDNA
agtgctactctcctcgctccgggcccataacacttgggggtagctaaagtgaactgtatccgacatctggttcctacttcagggccataaagcctaaatagcccacacgttccccttaaa

SEQ ID NO: 81155 - DNA, 120 bp, Homo sapiens
  misc_feature: 482 for SV(C|O) and mtDNA
ttcttcaaagccatactatttatgtgctccgggtccatcatccacaaccttaacaatgaacaagatatccgaaaaataggaggactactcaaaaccatacctctcacttcaacctccctc

SEQ ID NO: 81156 - DNA, 120 bp, Homo sapiens
  misc_feature: 482 for SV(C|O) and mtDNA
ccatcatagcaggcagttgaggtggattaaaccaaacccagctacgcaaaatcttagcatactcctcaattacccacataggatgaataatagcagttctaccgtacaaccctaacataa

SEQ ID NO: 81157 - DNA, 120 bp, Homo sapiens
  misc_feature: 482 for SV(C|O) and mtDNA
agcatcaaactcaaactacgccctgatcggcgcactgcgagcagtagcccaaacaatctcatatgaagtcaccctagccatcattctactatcaacattactaataagtggctcctttaa

SEQ ID NO: 81158 - DNA, 120 bp, Homo sapiens
  misc_feature: 482 for SV(C|O) and mtDNA
caggtcaacctcgcttccccacccttactaacattaacgaaaataaccccaccctactaaaccccattaaacgcctgacagccggaagcctattcgcaggatttctcattactaacaaca

SEQ ID NO: 81159 - DNA, 120 bp, Homo sapiens; identical to SEQ ID NO: 62549
  misc_feature: 482 for SV(C|O) and mtDNA

SEQ ID NO: 81160 - DNA, 120 bp, Homo sapiens
  misc_feature: 482 for SV(C|O) and mtDNA
tcctcacaggtttctactccaaagaccacatcatcgaaaccgcaaacatatcatacacaaacgcctgagccctatctattactctcatcgctacctccctgacaagcgcctatagcactc

SEQ ID NO: 81161 - DNA, 120 bp, Homo sapiens
  misc_feature: 482 for SV(C|O) and mtDNA
tcctaggaaagtgacagcgagggctgtgagttttaggtagagggggattgttgtttggaagggggatgcgggggaaatgttgttagtaatgagaaatcctgcgaataggcttccggctgt

SEQ ID NO: 81162 - DNA, 120 bp, Homo sapiens
  misc_feature: 482 for SV(C|O) and mtDNA
tcccgcacaagagtgctactctcctcgctccgggcccataacacttgggggtagctaaagtgaactgtatccgacatctggttcctacttcagggccataaagcctaaatagcccacacg

SEQ ID NO: 81163 - DNA, 120 bp, Homo sapiens; identical to SEQ ID NO: 62970
  misc_feature: 482 for SV(C|O) and mtDNA

SEQ ID NO: 81164 - DNA, 120 bp, Homo sapiens
  misc_feature: 482 for SV(C|O) and mtDNA
taggaaagtgacagcgagggctgtgagttttaggtagagggggattgttgtttggaagggggatgcgggggaaatgttgttagtaatgagaaatcctgcgaataggcttccggctgtcag

SEQ ID NO: 81165 - DNA, 120 bp, Homo sapiens
  misc_feature: 482 for SV(C|O) and mtDNA
gtgctactctcctcgctccgggcccataacacttgggggtagctaaagtgaactgtatccgacatctggttcctacttcagggccataaagcctaaatagcccacacgttccccttaaat

SEQ ID NO: 81166 - DNA, 120 bp, Homo sapiens
  misc_feature: 482 for SV(C|O) and mtDNA
gggtgagcatcaaactcaaactacgccctgatcggcgcactgcgagcagtagcccaaacaatctcatatgaagtcaccctagccatcattctactatcaacattactaataagtggctcc

SEQ ID NO: 81167 - DNA, 120 bp, Homo sapiens; identical to SEQ ID NO: 62494
  misc_feature: 482 for SV(C|O) and mtDNA

SEQ ID NO: 81168 - DNA, 120 bp, Homo sapiens; identical to SEQ ID NO: 61454
  misc_feature: 482 for SV(C|O) and mtDNA

SEQ ID NO: 81169 - DNA, 120 bp, Homo sapiens
  misc_feature: 482 for SV(C|O) and mtDNA
gggagattattccgaagcctggtaggataagaatataaacttcagggtgaccgaaaaatcagaataggtgttggtatagaatggggtctcctcctccggcggggtcgaagaaggtggtgt

SEQ ID NO: 81170 - DNA, 120 bp, Homo sapiens
  misc_feature: 482 for SV(C|O) and mtDNA
caacctcgcttccccacccttactaacattaacgaaaataaccccaccctactaaaccccattaaacgcctgacagccggaagcctattcgcaggatttctcattactaacaacatttcc

SEQ ID NO: 81171 - DNA, 120 bp, Homo sapiens
  misc_feature: 482 for SV(C|O) and mtDNA
gaggattgagtaaacggctaggctagaggtggctagaataaataggaggcctaggttgaggttgaccagggggttgggtatggggaggggggttcatagtagaagagcgatggtgagagc

SEQ ID NO: 81172 - DNA, 120 bp, Homo sapiens
  misc_feature: 482 for SV(C|O) and mtDNA
caaccccctaggaatcacctcccattccgataaaatcaccttccacccttactacacaatcaaagacgccctcggcttacttctcttccttctctccttaatgacattaacactattctc

SEQ ID NO: 81173 - DNA, 120 bp, Homo sapiens
  misc_feature: 482 for SV(C|O) and mtDNA
ctgatcagaggattgagtaaacggctaggctagaggtggctagaataaataggaggcctaggttgaggttgaccagggggttgggtatggggaggggggttcatagtagaagagcgatgg

SEQ ID NO: 81174 - DNA, 120 bp, Homo sapiens
  misc_feature: 482 for SV(C|O) and mtDNA
aacacctctgattactcctgccatcatgacccttggccataatatgatttatctccacactagcagagaccaaccgaacccccttcgaccttgccgaaggagagtccgaactagtctcag

SEQ ID NO: 81175 - DNA, 120 bp, Homo sapiens
  misc_feature: 482 for SV(C|O) and mtDNA
ctctctcaatcttatccatcatagcaggcagttgaggtggattaaaccaaacccagctacgcaaaatcttagcatactcctcaattacccacataggatgaataatagcagttctaccgt

SEQ ID NO: 81176 - DNA, 120 bp, Homo sapiens
  misc_feature: 482 for SV(C|O) and mtDNA
agaggattgagtaaacggctaggctagaggtggctagaataaataggaggcctaggttgaggttgaccagggggttgggtatggggaggggggttcatagtagaagagcgatggtgagag

SEQ ID NO: 81177 - DNA, 120 bp, Homo sapiens
  misc_feature: 482 for SV(C|O) and mtDNA
ctatagggtaaatacgggccctatttcaaagatttttaggggaattaattctaggacgatgggcatgaaactgtggtttgctccacagatttcagagcattgaccgtagtatacccccgg

SEQ ID NO: 81178 - DNA, 120 bp, Homo sapiens
  misc_feature: 482 for SV(C|O) and mtDNA
cctctgattactcctgccatcatgacccttggccataatatgatttatctccacactagcagagaccaaccgaacccccttcgaccttgccgaaggagagtccgaactagtctcaggctt

SEQ ID NO: 81179 - DNA, 120 bp, Homo sapiens
  misc_feature: 482 for SV(C|O) and mtDNA
aatatgggagattattccgaagcctggtaggataagaatataaacttcagggtgaccgaaaaatcagaataggtgttggtatagaatggggtctcctcctccggcggggtcgaagaaggt

SEQ ID NO: 81180 - DNA, 120 bp, Homo sapiens
  misc_feature: 481 for SV(C|O) and mtDNA
ttgagtaaacggctaggctagaggtggctagaataaataggaggcctaggttgaggttgaccagggggttgggtatggggaggggggttcatagtagaagagcgatggtgagagctaagg

SEQ ID NO: 81181 - DNA, 120 bp, Homo sapiens
  misc_feature: 481 for SV(C|O) and mtDNA
ttctattagctcttagtaagattacacatgcaagcatccccgttccagtgagttcaccctctaaatcaccacgatcaaaagggacaagcatcaagcacgcagcaatgcagctcaaaacgc

SEQ ID NO: 81182 - DNA, 120 bp, Homo sapiens
  misc_feature: 481 for SV(C|O) and mtDNA
ttaacctttagcaataaacgaaagtttaactaagctatactaaccccagggttggtcaatttcgtgccagccaccgcggtcacacgattaacccaagtcaatagaagccggcgtaaagag

SEQ ID NO: 81183 - DNA, 120 bp, Homo sapiens
  misc_feature: 481 for SV(C|O) and mtDNA
tgtcaggcgtttaatggggtttagtagggtggggttattttcgttaatgttagtaagggtggggaagcgaggttgacctgttagggtgagaagaattattcgagtgctataggcgcttgt

SEQ ID NO: 81184 - DNA, 120 bp, Homo sapiens
  misc_feature: 481 for SV(C|O) and mtDNA
aaattctccgtgccacctatcacaccccatcctaaagtaaggtcagctaaataagctatcgggcccataccccgaaaatgttggttatacccttcccgtactaattaatcccctggccca

SEQ ID NO: 81185 - DNA, 120 bp, Homo sapiens
  misc_feature: 481 for SV(C|O) and mtDNA
tcttcaaagccatactatttatgtgctccgggtccatcatccacaaccttaacaatgaacaagatatccgaaaaataggaggactactcaaaaccatacctctcacttcaacctccctca

SEQ ID NO: 81186 - DNA, 120 bp, Homo sapiens
  misc_feature: 481 for SV(C|O) and mtDNA
ccttatcacaacacaagaacacctctgattactcctgccatcatgacccttggccataatatgatttatctccacactagcagagaccaaccgaacccccttcgaccttgccgaaggaga

SEQ ID NO: 81187 - DNA, 120 bp, Homo sapiens
  misc_feature: 481 for SV(C|O) and mtDNA
cggtcacacgattaacccaagtcaatagaagccggcgtaaagagtgttttagatcaccccctccccaataaagctaaaactcacctgagttgtaaaaaactccagctgacacaaaataga

SEQ ID NO: 81188 - DNA, 120 bp, Homo sapiens
  misc_feature: 481 for SV(C|O) and mtDNA
tcaatatcccgcacaagagtgctactctcctcgctccgggcccataacacttgggggtagctaaagtgaactgtatccgacatctggttcctacttcagggccataaagcctaaatagcc

SEQ ID NO: 81189 - DNA, 120 bp, Homo sapiens
  misc_feature: 481 for SV(C|O) and mtDNA
tcaacctcgcttccccacccttactaacattaacgaaaataaccccaccctactaaaccccattaaacgcctgacagccggaagcctattcgcaggatttctcattactaacaacatttc

SEQ ID NO: 81190 - DNA, 120 bp, Homo sapiens
  misc_feature: 481 for SV(C|O) and mtDNA
ccctaacaggtcaacctcgcttccccacccttactaacattaacgaaaataaccccaccctactaaaccccattaaacgcctgacagccggaagcctattcgcaggatttctcattacta

SEQ ID NO: 81191 - DNA, 120 bp, Homo sapiens
  misc_feature: 481 for SV(C|O) and mtDNA
ctcactctctcaatcttatccatcatagcaggcagttgaggtggattaaaccaaacccagctacgcaaaatcttagcatactcctcaattacccacataggatgaataatagcagttcta

SEQ ID NO: 81192 - DNA, 120 bp, Homo sapiens; identical to SEQ ID NO: 58920
  misc_feature: 481 for SV(C|O) and mtDNA

SEQ ID NO: 81193 - DNA, 120 bp, Homo sapiens
  misc_feature: 481 for SV(C|O) and mtDNA
ataacaaaccctgagaaccaaaatgaacgaaaatctgttcgcttcattcattgcccccacaatcctaggcctacccgccgcagtactgatcattctatttccccctctattgatccccac

SEQ ID NO: 81194 - DNA, 120 bp, Homo sapiens
  misc_feature: 481 for SV(C|O) and mtDNA
gtcacacgattaacccaagtcaatagaagccggcgtaaagagtgttttagatcaccccctccccaataaagctaaaactcacctgagttgtaaaaaactccagctgacacaaaatagact

SEQ ID NO: 81195 - DNA, 120 bp, Homo sapiens; identical to SEQ ID NO: 61305
  misc_feature: 481 for SV(C|O) and mtDNA

SEQ ID NO: 81196 - DNA, 120 bp, Homo sapiens
  misc_feature: 481 for SV(C|O) and mtDNA
cctcccttaccatcaaatcaattggccaccaatggtactgaacctacgagtacaccgactacggcggactaatcttcaactcctacatacttcccccattattcctagaaccaggcgacc

SEQ ID NO: 81197 - DNA, 120 bp, Homo sapiens
  misc_feature: 481 for SV(C|O) and mtDNA
cactctctcaatcttatccatcatagcaggcagttgaggtggattaaaccaaacccagctacgcaaaatcttagcatactcctcaattacccacataggatgaataatagcagttctacc

SEQ ID NO: 81198 - DNA, 120 bp, Homo sapiens
  misc_feature: 481 for SV(C|O) and mtDNA
caaaattctccgtgccacctatcacaccccatcctaaagtaaggtcagctaaataagctatcgggcccataccccgaaaatgttggttatacccttcccgtactaattaatcccctggcc

SEQ ID NO: 81199 - DNA, 120 bp, Homo sapiens; identical to SEQ ID NO: 62347
  misc_feature: 481 for SV(C|O) and mtDNA

SEQ ID NO: 81200 - DNA, 120 bp, Homo sapiens
  misc_feature: 481 for SV(C|O) and mtDNA
ccgagtatgttggagaaataaaatgtgcatagtggggattttattttaagtttgttggttaggtagttgaggtctagggctgttagaagtcctaggaaagtgacagcgagggctgtgagt

SEQ ID NO: 81201 - DNA, 120 bp, Homo sapiens; identical to SEQ ID NO: 57623
  misc_feature: 481 for SV(C|O) and mtDNA

SEQ ID NO: 81202 - DNA, 120 bp, Homo sapiens; identical to SEQ ID NO: 62915
  misc_feature: 480 for SV(C|O) and mtDNA

SEQ ID NO: 81203 - DNA, 120 bp, Homo sapiens; identical to SEQ ID NO: 58045
  misc_feature: 480 for SV(C|O) and mtDNA

SEQ ID NO: 81204 - DNA, 120 bp, Homo sapiens
  misc_feature: 480 for SV(C|O) and mtDNA
tgttttagtggggttagcgatggaggtaggattggtgctgtgggtgaaagagtatgatggggtggtggttgtggtaaactttaatagtgtaggaagctgaataatttatgaaggagaggg

SEQ ID NO: 81205 - DNA, 120 bp, Homo sapiens
  misc_feature: 480 for SV(C|O) and mtDNA
tggttttgagtagtcctcctatttttcggatatcttgttcattgttaaggttgtggatgatggacccggagcacataaatagtatggctttgaagaaggcgtgggtacagatgtgcagga

SEQ ID NO: 81206 - DNA, 120 bp, Homo sapiens
  misc_feature: 480 for SV(C|O) and mtDNA
tgccgaaggagagtccgaactagtctcaggcttcaacatcgaatacgccgcaggccccttcgccttattcttcatagccgaatacacaaacattattataataaacaccctcaccactac

SEQ ID NO: 81207 - DNA, 120 bp, Homo sapiens
  misc_feature: 480 for SV(C|O) and mtDNA
acttgggggtagctaaagtgaactgtatccgacatctggttcctacttcagggccataaagcctaaatagcccacacgttccccttaaataagacatcacgatggatcacaggtctatca

SEQ ID NO: 81208 - DNA, 120 bp, Homo sapiens
  misc_feature: 480 for SV(C|O) and mtDNA
tgagtaaacggctaggctagaggtggctagaataaataggaggcctaggttgaggttgaccagggggttgggtatggggaggggggttcatagtagaagagcgatggtgagagctaaggt

SEQ ID NO: 81209 - DNA, 120 bp, Homo sapiens; identical to SEQ ID NO: 57761
  misc_feature: 480 for SV(C|O) and mtDNA

SEQ ID NO: 81210 - DNA, 120 bp, Homo sapiens
  misc_feature: 480 for SV(C|O) and mtDNA
tatgggagattattccgaagcctggtaggataagaatataaacttcagggtgaccgaaaaatcagaataggtgttggtatagaatggggtctcctcctccggcggggtcgaagaaggtgg

SEQ ID NO: 81211 - DNA, 120 bp, Homo sapiens; identical to SEQ ID NO: 60754
  misc_feature: 480 for SV(C|O) and mtDNA

SEQ ID NO: 81212 - DNA, 120 bp, Homo sapiens; identical to SEQ ID NO: 61758
  misc_feature: 480 for SV(C|O) and mtDNA

SEQ ID NO: 81213 - DNA, 120 bp, Homo sapiens
  misc_feature: 480 for SV(C|O) and mtDNA
gagcatcaaactcaaactacgccctgatcggcgcactgcgagcagtagcccaaacaatctcatatgaagtcaccctagccatcattctactatcaacattactaataagtggctccttta

SEQ ID NO: 81214 - DNA, 120 bp, Homo sapiens
  misc_feature: 480 for SV(C|O) and mtDNA
catcatagcaggcagttgaggtggattaaaccaaacccagctacgcaaaatcttagcatactcctcaattacccacataggatgaataatagcagttctaccgtacaaccctaacataac

SEQ ID NO: 81215 - DNA, 120 bp, Homo sapiens
  misc_feature: 480 for SV(C|O) and mtDNA
gtgtgttcagatatgttaaagccactttcgtagtctattttgtgtcagctggagttttttacaactcaggtgagttttagctttattggggagggggtgatctaaaacactctttacgcc

SEQ ID NO: 81216 - DNA, 120 bp, Homo sapiens
  misc_feature: 480 for SV(C|O) and mtDNA
accccctaggaatcacctcccattccgataaaatcaccttccacccttactacacaatcaaagacgccctcggcttacttctcttccttctctccttaatgacattaacactattctcac

SEQ ID NO: 81217 - DNA, 120 bp, Homo sapiens
  misc_feature: 480 for SV(C|O) and mtDNA
ccattcgtataataattacatcacaagacgtcttgcactcatgagctgtccccacattaggcttaaaaacagatgcaattcccggacgtctaaaccaaaccactttcaccgctacacgac

SEQ ID NO: 81218 - DNA, 120 bp, Homo sapiens
  misc_feature: 480 for SV(C|O) and mtDNA
aggatgaataatagcagttctaccgtacaaccctaacataaccattcttaatttaactatttatattatcctaactactaccgcattcctactactcaacttaaactccagcaccacgac

SEQ ID NO: 81219 - DNA, 120 bp, Homo sapiens
  misc_feature: 480 for SV(C|O) and mtDNA
ccccctaggaatcacctcccattccgataaaatcaccttccacccttactacacaatcaaagacgccctcggcttacttctcttccttctctccttaatgacattaacactattctcacc

SEQ ID NO: 81220 - DNA, 120 bp, Homo sapiens; identical to SEQ ID NO: 59147
  misc_feature: 480 for SV(C|O) and mtDNA

SEQ ID NO: 81221 - DNA, 120 bp, Homo sapiens
  misc_feature: 480 for SV(C|O) and mtDNA
gcccaaacaatctcatatgaagtcaccctagccatcattctactatcaacattactaataagtggctcctttaacctctccacccttatcacaacacaagaacacctctgattactcctg

SEQ ID NO: 81222 - DNA, 120 bp, Homo sapiens
  misc_feature: 480 for SV(C|O) and mtDNA
agaacacctctgattactcctgccatcatgacccttggccataatatgatttatctccacactagcagagaccaaccgaacccccttcgaccttgccgaaggagagtccgaactagtctc

SEQ ID NO: 81223 - DNA, 120 bp, Homo sapiens
  misc_feature: 480 for SV(C|O) and mtDNA
gaatacctttcctcacaggtttctactccaaagaccacatcatcgaaaccgcaaacatatcatacacaaacgcctgagccctatctattactctcatcgctacctccctgacaagcgcct

SEQ ID NO: 81224 - DNA, 120 bp, Homo sapiens
  misc_feature: 480 for SV(C|O) and mtDNA
cgtaagaaggcctagataggggattgtgcggtgtgtgatggtagggtagaatccgagtatgttggagaaataaaatgtgcatagtggggattttattttaagtttgttggttaggtagtt

SEQ ID NO: 81225 - DNA, 120 bp, Homo sapiens
  misc_feature: 479 for SV(C|O) and mtDNA
ttttagtggggttagcgatggaggtaggattggtgctgtgggtgaaagagtatgatggggtggtggttgtggtaaactttaatagtgtaggaagctgaataatttatgaaggagaggggt

SEQ ID NO: 81226 - DNA, 120 bp, Homo sapiens
  misc_feature: 479 for SV(C|O) and mtDNA
ttcgtttattgctaaaggttaatcactgctgtttcccgtgggggtgtggctaggctaagcgttttgagctgcattgctgcgtgcttgatgcttgtcccttttgatcgtggtgatttagag

SEQ ID NO: 81227 - DNA, 120 bp, Homo sapiens
  misc_feature: 479 for SV(C|O) and mtDNA
ctctcctcgctccgggcccataacacttgggggtagctaaagtgaactgtatccgacatctggttcctacttcagggccataaagcctaaatagcccacacgttccccttaaataagaca

SEQ ID NO: 81228 - DNA, 120 bp, Homo sapiens; identical to SEQ ID NO: 56898
  misc_feature: 479 for SV(C|O) and mtDNA

SEQ ID NO: 81229 - DNA, 120 bp, Homo sapiens
  misc_feature: 479 for SV(C|O) and mtDNA
acccttatcacaacacaagaacacctctgattactcctgccatcatgacccttggccataatatgatttatctccacactagcagagaccaaccgaacccccttcgaccttgccgaagga

SEQ ID NO: 81230 - DNA, 120 bp, Homo sapiens
  misc_feature: 479 for SV(C|O) and mtDNA
tccgggcccataacacttgggggtagctaaagtgaactgtatccgacatctggttcctacttcagggccataaagcctaaatagcccacacgttccccttaaataagacatcacgatgga

SEQ ID NO: 81231 - DNA, 120 bp, Homo sapiens
  misc_feature: 479 for SV(C|O) and mtDNA
cttaccgaacgaaaaattctaggctatatacaactacgcaaaggccccaacgttgtaggcccctacgggctactacaacccttcgctgacgccataaaactcttcaccaaagagccccta

SEQ ID NO: 81232 - DNA, 120 bp, Homo sapiens; identical to SEQ ID NO: 62960
  misc_feature: 479 for SV(C|O) and mtDNA

SEQ ID NO: 81233 - DNA, 120 bp, Homo sapiens
  misc_feature: 479 for SV(C|O) and mtDNA
aaaatgaacgaaaatctgttcgcttcattcattgcccccacaatcctaggcctacccgccgcagtactgatcattctatttccccctctattgatccccacctccaaatatctcatcaac

SEQ ID NO: 81234 - DNA, 120 bp, Homo sapiens
  misc_feature: 479 for SV(C|O) and mtDNA
cataggatgaataatagcagttctaccgtacaaccctaacataaccattcttaatttaactatttatattatcctaactactaccgcattcctactactcaacttaaactccagcaccac

SEQ ID NO: 81235 - DNA, 120 bp, Homo sapiens
  misc_feature: 479 for SV(C|O) and mtDNA
ctgttcaacctgttcctgctccggcctccactatagcagatgcgagcaggagtaggagagagggaggtaagagtcagaagcttatgttgtttatgcggggaaacgccatatcgggggcac

SEQ ID NO: 81236 - DNA, 120 bp, Homo sapiens
  misc_feature: 479 for SV(C|O) and mtDNA
acgagaagaccctatggagctttaatttattaatgcaaacagtacctaacaaacccacaggtcctaaactaccaaacctgcattaaaaatttcggttggggcgacctcggagcagaaccc

SEQ ID NO: 81237 - DNA, 120 bp, Homo sapiens
  misc_feature: 479 for SV(C|O) and mtDNA
aattataacaaaccctgagaaccaaaatgaacgaaaatctgttcgcttcattcattgcccccacaatcctaggcctacccgccgcagtactgatcattctatttccccctctattgatcc

SEQ ID NO: 81238 - DNA, 120 bp, Homo sapiens
  misc_feature: 479 for SV(C|O) and mtDNA
caagaacacctctgattactcctgccatcatgacccttggccataatatgatttatctccacactagcagagaccaaccgaacccccttcgaccttgccgaaggagagtccgaactagtc

SEQ ID NO: 81239 - DNA, 120 bp, Homo sapiens
  misc_feature: 479 for SV(C|O) and mtDNA
ctctcacttcaacctccctcaccattggcagcctagcattagcaggaatacctttcctcacaggtttctactccaaagaccacatcatcgaaaccgcaaacatatcatacacaaacgcct

SEQ ID NO: 81240 - DNA, 120 bp, Homo sapiens; identical to SEQ ID NO: 58188
  misc_feature: 479 for SV(C|O) and mtDNA

SEQ ID NO: 81241 - DNA, 120 bp, Homo sapiens
  misc_feature: 479 for SV(C|O) and mtDNA
acacttgggggtagctaaagtgaactgtatccgacatctggttcctacttcagggccataaagcctaaatagcccacacgttccccttaaataagacatcacgatggatcacaggtctat

SEQ ID NO: 81242 - DNA, 120 bp, Homo sapiens
  misc_feature: 478 for SV(C|O) and mtDNA
gcctttctattagctcttagtaagattacacatgcaagcatccccgttccagtgagttcaccctctaaatcaccacgatcaaaagggacaagcatcaagcacgcagcaatgcagctcaaa

SEQ ID NO: 81243 - DNA, 120 bp, Homo sapiens
  misc_feature: 478 for SV(C|O) and mtDNA
ttgccgaaggagagtccgaactagtctcaggcttcaacatcgaatacgccgcaggccccttcgccttattcttcatagccgaatacacaaacattattataataaacaccctcaccacta

SEQ ID NO: 81244 - DNA, 120 bp, Homo sapiens
  misc_feature: 478 for SV(C|O) and mtDNA
ttcctcacaggtttctactccaaagaccacatcatcgaaaccgcaaacatatcatacacaaacgcctgagccctatctattactctcatcgctacctccctgacaagcgcctatagcact

SEQ ID NO: 81245 - DNA, 120 bp, Homo sapiens
  misc_feature: 478 for SV(C|O) and mtDNA
actgttcaacctgttcctgctccggcctccactatagcagatgcgagcaggagtaggagagagggaggtaagagtcagaagcttatgttgtttatgcggggaaacgccatatcgggggca

SEQ ID NO: 81246 - DNA, 120 bp, Homo sapiens
  misc_feature: 478 for SV(C|O) and mtDNA
gtatggttttgagtagtcctcctatttttcggatatcttgttcattgttaaggttgtggatgatggacccggagcacataaatagtatggctttgaagaaggcgtgggtacagatgtgca

SEQ ID NO: 81247 - DNA, 120 bp, Homo sapiens
  misc_feature: 478 for SV(C|O) and mtDNA
tgagcatcaaactcaaactacgccctgatcggcgcactgcgagcagtagcccaaacaatctcatatgaagtcaccctagccatcattctactatcaacattactaataagtggctccttt

SEQ ID NO: 81248 - DNA, 120 bp, Homo sapiens
  misc_feature: 478 for SV(C|O) and mtDNA
tccgagtatgttggagaaataaaatgtgcatagtggggattttattttaagtttgttggttaggtagttgaggtctagggctgttagaagtcctaggaaagtgacagcgagggctgtgag

SEQ ID NO: 81249 - DNA, 120 bp, Homo sapiens
  misc_feature: 478 for SV(C|O) and mtDNA
cttgggggtagctaaagtgaactgtatccgacatctggttcctacttcagggccataaagcctaaatagcccacacgttccccttaaataagacatcacgatggatcacaggtctatcac

SEQ ID NO: 81250 - DNA, 120 bp, Homo sapiens; identical to SEQ ID NO: 60780
  misc_feature: 478 for SV(C|O) and mtDNA

SEQ ID NO: 81251 - DNA, 120 bp, Homo sapiens
  misc_feature: 478 for SV(C|O) and mtDNA
cacacgattaacccaagtcaatagaagccggcgtaaagagtgttttagatcaccccctccccaataaagctaaaactcacctgagttgtaaaaaactccagctgacacaaaatagactac

SEQ ID NO: 81252 - DNA, 120 bp, Homo sapiens
  misc_feature: 478 for SV(C|O) and mtDNA
ggaatacctttcctcacaggtttctactccaaagaccacatcatcgaaaccgcaaacatatcatacacaaacgcctgagccctatctattactctcatcgctacctccctgacaagcgcc

SEQ ID NO: 81253 - DNA, 120 bp, Homo sapiens; identical to SEQ ID NO: 60224
  misc_feature: 478 for SV(C|O) and mtDNA

SEQ ID NO: 81254 - DNA, 120 bp, Homo sapiens
  misc_feature: 478 for SV(C|O) and mtDNA
attgagtaaacggctaggctagaggtggctagaataaataggaggcctaggttgaggttgaccagggggttgggtatggggaggggggttcatagtagaagagcgatggtgagagctaag

SEQ ID NO: 81255 - DNA, 120 bp, Homo sapiens
  misc_feature: 478 for SV(C|O) and mtDNA
atggttttgagtagtcctcctatttttcggatatcttgttcattgttaaggttgtggatgatggacccggagcacataaatagtatggctttgaagaaggcgtgggtacagatgtgcagg

SEQ ID NO: 81256 - DNA, 120 bp, Homo sapiens
  misc_feature: 478 for SV(C|O) and mtDNA
ccctgatcagaggattgagtaaacggctaggctagaggtggctagaataaataggaggcctaggttgaggttgaccagggggttgggtatggggaggggggttcatagtagaagagcgat

SEQ ID NO: 81257 - DNA, 120 bp, Homo sapiens; identical to SEQ ID NO: 58194
  misc_feature: 478 for SV(C|O) and mtDNA

SEQ ID NO: 81258 - DNA, 120 bp, Homo sapiens
  misc_feature: 477 for SV(C|O) and mtDNA
ttctccgtgccacctatcacaccccatcctaaagtaaggtcagctaaataagctatcgggcccataccccgaaaatgttggttatacccttcccgtactaattaatcccctggcccaacc

SEQ ID NO: 81259 - DNA, 120 bp, Homo sapiens
  misc_feature: 477 for SV(C|O) and mtDNA
tctcctcgctccgggcccataacacttgggggtagctaaagtgaactgtatccgacatctggttcctacttcagggccataaagcctaaatagcccacacgttccccttaaataagacat

SEQ ID NO: 81260 - DNA, 120 bp, Homo sapiens; identical to SEQ ID NO: 58771
  misc_feature: 477 for SV(C|O) and mtDNA

SEQ ID NO: 81261 - DNA, 120 bp, Homo sapiens
  misc_feature: 477 for SV(C|O) and mtDNA
aaacacaaactaccacctacctccctcaccaaagcccataaaaataaaaaattataacaaaccctgagaaccaaaatgaacgaaaatctgttcgcttcattcattgcccccacaatccta

SEQ ID NO: 81262 - DNA, 120 bp, Homo sapiens
  misc_feature: 477 for SV(C|O) and mtDNA
tagcgatggaggtaggattggtgctgtgggtgaaagagtatgatggggtggtggttgtggtaaactttaatagtgtaggaagctgaataatttatgaaggagaggggtcagggttgattc

SEQ ID NO: 81263 - DNA, 120 bp, Homo sapiens; identical to SEQ ID NO: 60383
  misc_feature: 477 for SV(C|O) and mtDNA

SEQ ID NO: 81264 - DNA, 120 bp, Homo sapiens
  misc_feature: 477 for SV(C|O) and mtDNA
gtagctaaagtgaactgtatccgacatctggttcctacttcagggccataaagcctaaatagcccacacgttccccttaaataagacatcacgatggatcacaggtctatcaccctatta

SEQ ID NO: 81265 - DNA, 120 bp, Homo sapiens
  misc_feature: 477 for SV(C|O) and mtDNA
gcatcaaactcaaactacgccctgatcggcgcactgcgagcagtagcccaaacaatctcatatgaagtcaccctagccatcattctactatcaacattactaataagtggctcctttaac

SEQ ID NO: 81266 - DNA, 120 bp, Homo sapiens
  misc_feature: 477 for SV(C|O) and mtDNA
ggatgaataatagcagttctaccgtacaaccctaacataaccattcttaatttaactatttatattatcctaactactaccgcattcctactactcaacttaaactccagcaccacgacc

SEQ ID NO: 81267 - DNA, 120 bp, Homo sapiens; identical to SEQ ID NO: 58089
  misc_feature: 477 for SV(C|O) and mtDNA

SEQ ID NO: 81268 - DNA, 120 bp, Homo sapiens; identical to SEQ ID NO: 59801
  misc_feature: 477 for SV(C|O) and mtDNA

SEQ ID NO: 81269 - DNA, 120 bp, Homo sapiens
  misc_feature: 477 for SV(C|O) and mtDNA
cccttatcacaacacaagaacacctctgattactcctgccatcatgacccttggccataatatgatttatctccacactagcagagaccaaccgaacccccttcgaccttgccgaaggag

SEQ ID NO: 81270 - DNA, 120 bp, Homo sapiens; identical to SEQ ID NO: 58669
  misc_feature: 477 for SV(C|O) and mtDNA

SEQ ID NO: 81271 - DNA, 120 bp, Homo sapiens
  misc_feature: 477 for SV(C|O) and mtDNA
catcgccctcccatccctgcgcatcctttacataacagacgaggtcaacgatccctcccttaccatcaaatcaattggccaccaatggtactgaacctacgagtacaccgactacggcgg

SEQ ID NO: 81272 - DNA, 120 bp, Homo sapiens; identical to SEQ ID NO: 61098
  misc_feature: 477 for SV(C|O) and mtDNA

SEQ ID NO: 81273 - DNA, 120 bp, Homo sapiens
  misc_feature: 477 for SV(C|O) and mtDNA
aggattgagtaaacggctaggctagaggtggctagaataaataggaggcctaggttgaggttgaccagggggttgggtatggggaggggggttcatagtagaagagcgatggtgagagct

SEQ ID NO: 81274 - DNA, 120 bp, Homo sapiens
  misc_feature: 477 for SV(C|O) and mtDNA
agcccaaacaatctcatatgaagtcaccctagccatcattctactatcaacattactaataagtggctcctttaacctctccacccttatcacaacacaagaacacctctgattactcct

SEQ ID NO: 81275 - DNA, 120 bp, Homo sapiens
  misc_feature: 477 for SV(C|O) and mtDNA
acaagaacacctctgattactcctgccatcatgacccttggccataatatgatttatctccacactagcagagaccaaccgaacccccttcgaccttgccgaaggagagtccgaactagt

SEQ ID NO: 81276 - DNA, 120 bp, Homo sapiens; identical to SEQ ID NO: 55038
  misc_feature: 476 for SV(C|O) and mtDNA

SEQ ID NO: 81277 - DNA, 120 bp, Homo sapiens
  misc_feature: 476 for SV(C|O) and mtDNA
ttagcgatggaggtaggattggtgctgtgggtgaaagagtatgatggggtggtggttgtggtaaactttaatagtgtaggaagctgaataatttatgaaggagaggggtcagggttgatt

SEQ ID NO: 81278 - DNA, 120 bp, Homo sapiens
  misc_feature: 476 for SV(C|O) and mtDNA
gcccataacacttgggggtagctaaagtgaactgtatccgacatctggttcctacttcagggccataaagcctaaatagcccacacgttccccttaaataagacatcacgatggatcaca

SEQ ID NO: 81279 - DNA, 120 bp, Homo sapiens; identical to SEQ ID NO: 59397
  misc_feature: 476 for SV(C|O) and mtDNA

SEQ ID NO: 81280 - DNA, 120 bp, Homo sapiens
  misc_feature: 476 for SV(C|O) and mtDNA
tataacaaaccctgagaaccaaaatgaacgaaaatctgttcgcttcattcattgcccccacaatcctaggcctacccgccgcagtactgatcattctatttccccctctattgatcccca

SEQ ID NO: 81281 - DNA, 120 bp, Homo sapiens
  misc_feature: 476 for SV(C|O) and mtDNA
atcgccctcccatccctgcgcatcctttacataacagacgaggtcaacgatccctcccttaccatcaaatcaattggccaccaatggtactgaacctacgagtacaccgactacggcgga

SEQ ID NO: 81282 - DNA, 120 bp, Homo sapiens
  misc_feature: 476 for SV(C|O) and mtDNA
tccatcatagcaggcagttgaggtggattaaaccaaacccagctacgcaaaatcttagcatactcctcaattacccacataggatgaataatagcagttctaccgtacaaccctaacata

SEQ ID NO: 81283 - DNA, 120 bp, Homo sapiens
  misc_feature: 476 for SV(C|O) and mtDNA
tcaccctaacaggtcaacctcgcttccccacccttactaacattaacgaaaataaccccaccctactaaaccccattaaacgcctgacagccggaagcctattcgcaggatttctcatta

SEQ ID NO: 81284 - DNA, 120 bp, Homo sapiens
  misc_feature: 476 for SV(C|O) and mtDNA
taacagaccgcaacctcaacaccaccttcttcgaccccgccggaggaggagaccccattctataccaacacctattctgatttttcggtcaccctgaagtttatattcttatcctaccag

SEQ ID NO: 81285 - DNA, 120 bp, Homo sapiens
  misc_feature: 476 for SV(C|O) and mtDNA
gttttagtggggttagcgatggaggtaggattggtgctgtgggtgaaagagtatgatggggtggtggttgtggtaaactttaatagtgtaggaagctgaataatttatgaaggagagggg

SEQ ID NO: 81286 - DNA, 120 bp, Homo sapiens; identical to SEQ ID NO: 62456
  misc_feature: 476 for SV(C|O) and mtDNA

SEQ ID NO: 81287 - DNA, 120 bp, Homo sapiens
  misc_feature: 476 for SV(C|O) and mtDNA
caccctaacaggtcaacctcgcttccccacccttactaacattaacgaaaataaccccaccctactaaaccccattaaacgcctgacagccggaagcctattcgcaggatttctcattac

SEQ ID NO: 81288 - DNA, 120 bp, Homo sapiens
  misc_feature: 476 for SV(C|O) and mtDNA
ggggaaatgttgttagtaatgagaaatcctgcgaataggcttccggctgtcaggcgtttaatggggtttagtagggtggggttattttcgttaatgttagtaagggtggggaagcgaggt

SEQ ID NO: 81289 - DNA, 120 bp, Homo sapiens
  misc_feature: 476 for SV(C|O) and mtDNA
ccttcttcaaagccatactatttatgtgctccgggtccatcatccacaaccttaacaatgaacaagatatccgaaaaataggaggactactcaaaaccatacctctcacttcaacctccc

SEQ ID NO: 81290 - DNA, 120 bp, Homo sapiens
  misc_feature: 476 for SV(C|O) and mtDNA
cctttcctcacaggtttctactccaaagaccacatcatcgaaaccgcaaacatatcatacacaaacgcctgagccctatctattactctcatcgctacctccctgacaagcgcctatagc

SEQ ID NO: 81291 - DNA, 120 bp, Homo sapiens
  misc_feature: 476 for SV(C|O) and mtDNA
gattagtccgccgtagtcggtgtactcgtaggttcagtaccattggtggccaattgatttgatggtaagggagggatcgttgacctcgtctgttatgtaaaggatgcgcagggatgggag

SEQ ID NO: 81292 - DNA, 120 bp, Homo sapiens; identical to SEQ ID NO: 58249
  misc_feature: 476 for SV(C|O) and mtDNA

SEQ ID NO: 81293 - DNA, 120 bp, Homo sapiens
  misc_feature: 476 for SV(C|O) and mtDNA
cctctacttctacctacgcctaatctactccacctcaatcacactactccccatatctaacaacgtaaaaataaaatgacagtttgaacatacaaaacccaccccattcctccccacact

SEQ ID NO: 81294 - DNA, 120 bp, Homo sapiens
  misc_feature: 476 for SV(C|O) and mtDNA
aatccgagtatgttggagaaataaaatgtgcatagtggggattttattttaagtttgttggttaggtagttgaggtctagggctgttagaagtcctaggaaagtgacagcgagggctgtg

SEQ ID NO: 81295 - DNA, 120 bp, Homo sapiens
  misc_feature: 476 for SV(C|O) and mtDNA
attaaaccaaacccagctacgcaaaatcttagcatactcctcaattacccacataggatgaataatagcagttctaccgtacaaccctaacataaccattcttaatttaactatttatat

SEQ ID NO: 81296 - DNA, 120 bp, Homo sapiens; identical to SEQ ID NO: 58404
  misc_feature: 476 for SV(C|O) and mtDNA

SEQ ID NO: 81297 - DNA, 120 bp, Homo sapiens
  misc_feature: 475 for SV(C|O) and mtDNA
ttgggggtagctaaagtgaactgtatccgacatctggttcctacttcagggccataaagcctaaatagcccacacgttccccttaaataagacatcacgatggatcacaggtctatcacc

SEQ ID NO: 81298 - DNA, 120 bp, Homo sapiens; identical to SEQ ID NO: 56965
  misc_feature: 475 for SV(C|O) and mtDNA

SEQ ID NO: 81299 - DNA, 120 bp, Homo sapiens
  misc_feature: 475 for SV(C|O) and mtDNA
ttaaaccaaacccagctacgcaaaatcttagcatactcctcaattacccacataggatgaataatagcagttctaccgtacaaccctaacataaccattcttaatttaactatttatatt

SEQ ID NO: 81300 - DNA, 120 bp, Homo sapiens
  misc_feature: 475 for SV(C|O) and mtDNA
tctacttctacctacgcctaatctactccacctcaatcacactactccccatatctaacaacgtaaaaataaaatgacagtttgaacatacaaaacccaccccattcctccccacactca

SEQ ID NO: 81301 - DNA, 120 bp, Homo sapiens
  misc_feature: 475 for SV(C|O) and mtDNA
tcacacgattaacccaagtcaatagaagccggcgtaaagagtgttttagatcaccccctccccaataaagctaaaactcacctgagttgtaaaaaactccagctgacacaaaatagacta

SEQ ID NO: 81302 - DNA, 120 bp, Homo sapiens
  misc_feature: 475 for SV(C|O) and mtDNA
tagtggggttagcgatggaggtaggattggtgctgtgggtgaaagagtatgatggggtggtggttgtggtaaactttaatagtgtaggaagctgaataatttatgaaggagaggggtcag

SEQ ID NO: 81303 - DNA, 120 bp, Homo sapiens
  misc_feature: 475 for SV(C|O) and mtDNA
aatacctttcctcacaggtttctactccaaagaccacatcatcgaaaccgcaaacatatcatacacaaacgcctgagccctatctattactctcatcgctacctccctgacaagcgccta

SEQ ID NO: 81304 - DNA, 120 bp, Homo sapiens; identical to SEQ ID NO: 58685
  misc_feature: 475 for SV(C|O) and mtDNA

SEQ ID NO: 81305 - DNA, 120 bp, Homo sapiens
  misc_feature: 475 for SV(C|O) and mtDNA
attctccgtgccacctatcacaccccatcctaaagtaaggtcagctaaataagctatcgggcccataccccgaaaatgttggttatacccttcccgtactaattaatcccctggcccaac

SEQ ID NO: 81306 - DNA, 120 bp, Homo sapiens
  misc_feature: 475 for SV(C|O) and mtDNA
ccctcccttaccatcaaatcaattggccaccaatggtactgaacctacgagtacaccgactacggcggactaatcttcaactcctacatacttcccccattattcctagaaccaggcgac

SEQ ID NO: 81307 - DNA, 120 bp, Homo sapiens; identical to SEQ ID NO: 60388
  misc_feature: 475 for SV(C|O) and mtDNA

SEQ ID NO: 81308 - DNA, 120 bp, Homo sapiens
  misc_feature: 475 for SV(C|O) and mtDNA
atcaatatcccgcacaagagtgctactctcctcgctccgggcccataacacttgggggtagctaaagtgaactgtatccgacatctggttcctacttcagggccataaagcctaaatagc

SEQ ID NO: 81309 - DNA, 120 bp, Homo sapiens
  misc_feature: 475 for SV(C|O) and mtDNA
aggaatacctttcctcacaggtttctactccaaagaccacatcatcgaaaccgcaaacatatcatacacaaacgcctgagccctatctattactctcatcgctacctccctgacaagcgc

SEQ ID NO: 81310 - DNA, 120 bp, Homo sapiens
  misc_feature: 475 for SV(C|O) and mtDNA
gactgttcaacctgttcctgctccggcctccactatagcagatgcgagcaggagtaggagagagggaggtaagagtcagaagcttatgttgtttatgcggggaaacgccatatcgggggc

SEQ ID NO: 81311 - DNA, 120 bp, Homo sapiens
  misc_feature: 475 for SV(C|O) and mtDNA
gagggctgtgagttttaggtagagggggattgttgtttggaagggggatgcgggggaaatgttgttagtaatgagaaatcctgcgaataggcttccggctgtcaggcgtttaatggggtt

SEQ ID NO: 81312 - DNA, 120 bp, Homo sapiens; identical to SEQ ID NO: 57085
  misc_feature: 475 for SV(C|O) and mtDNA

SEQ ID NO: 81313 - DNA, 120 bp, Homo sapiens
  misc_feature: 475 for SV(C|O) and mtDNA
gaaatcaatatcccgcacaagagtgctactctcctcgctccgggcccataacacttgggggtagctaaagtgaactgtatccgacatctggttcctacttcagggccataaagcctaaat

SEQ ID NO: 81314 - DNA, 120 bp, Homo sapiens; identical to SEQ ID NO: 58250
  misc_feature: 475 for SV(C|O) and mtDNA

SEQ ID NO: 81315 - DNA, 120 bp, Homo sapiens
  misc_feature: 475 for SV(C|O) and mtDNA
aatatgttgtgtagagttcaggggagagtgcgtcatatgttgttcctaggaagattgtagtggtgagggtgtttattataataatgtttgtgtattcggctatgaagaataaggcgaagg

SEQ ID NO: 81316 - DNA, 120 bp, Homo sapiens
  misc_feature: 474 for SV(C|O) and mtDNA
ttatcacaacacaagaacacctctgattactcctgccatcatgacccttggccataatatgatttatctccacactagcagagaccaaccgaacccccttcgaccttgccgaaggagagt

SEQ ID NO: 81317 - DNA, 120 bp, Homo sapiens
  misc_feature: 474 for SV(C|O) and mtDNA
ttagtggggttagcgatggaggtaggattggtgctgtgggtgaaagagtatgatggggtggtggttgtggtaaactttaatagtgtaggaagctgaataatttatgaaggagaggggtca

SEQ ID NO: 81318 - DNA, 120 bp, Homo sapiens
  misc_feature: 474 for SV(C|O) and mtDNA
ttaccgaacgaaaaattctaggctatatacaactacgcaaaggccccaacgttgtaggcccctacgggctactacaacccttcgctgacgccataaaactcttcaccaaagagcccctaa

SEQ ID NO: 81319 - DNA, 120 bp, Homo sapiens
  misc_feature: 474 for SV(C|O) and mtDNA
gattgagtaaacggctaggctagaggtggctagaataaataggaggcctaggttgaggttgaccagggggttgggtatggggaggggggttcatagtagaagagcgatggtgagagctaa

SEQ ID NO: 81320 - DNA, 120 bp, Homo sapiens
  misc_feature: 474 for SV(C|O) and mtDNA
tgtgttcagatatgttaaagccactttcgtagtctattttgtgtcagctggagttttttacaactcaggtgagttttagctttattggggagggggtgatctaaaacactctttacgccg

SEQ ID NO: 81321 - DNA, 120 bp, Homo sapiens
  misc_feature: 474 for SV(C|O) and mtDNA
acataggatgaataatagcagttctaccgtacaaccctaacataaccattcttaatttaactatttatattatcctaactactaccgcattcctactactcaacttaaactccagcacca

SEQ ID NO: 81322 - DNA, 120 bp, Homo sapiens
  misc_feature: 474 for SV(C|O) and mtDNA
tgggggtagctaaagtgaactgtatccgacatctggttcctacttcagggccataaagcctaaatagcccacacgttccccttaaataagacatcacgatggatcacaggtctatcaccc

SEQ ID NO: 81323 - DNA, 120 bp, Homo sapiens
  misc_feature: 474 for SV(C|O) and mtDNA
tctcctcactctctcaatcttatccatcatagcaggcagttgaggtggattaaaccaaacccagctacgcaaaatcttagcatactcctcaattacccacataggatgaataatagcagt

SEQ ID NO: 81324 - DNA, 120 bp, Homo sapiens; identical to SEQ ID NO: 62382
  misc_feature: 474 for SV(C|O) and mtDNA

SEQ ID NO: 81325 - DNA, 120 bp, Homo sapiens; identical to SEQ ID NO: 58285
  misc_feature: 474 for SV(C|O) and mtDNA

SEQ ID NO: 81326 - DNA, 120 bp, Homo sapiens
  misc_feature: 474 for SV(C|O) and mtDNA
atccgagtatgttggagaaataaaatgtgcatagtggggattttattttaagtttgttggttaggtagttgaggtctagggctgttagaagtcctaggaaagtgacagcgagggctgtga

SEQ ID NO: 81327 - DNA, 120 bp, Homo sapiens
  misc_feature: 474 for SV(C|O) and mtDNA
aaatcaatatcccgcacaagagtgctactctcctcgctccgggcccataacacttgggggtagctaaagtgaactgtatccgacatctggttcctacttcagggccataaagcctaaata

SEQ ID NO: 81328 - DNA, 120 bp, Homo sapiens; identical to SEQ ID NO: 61718
  misc_feature: 474 for SV(C|O) and mtDNA

SEQ ID NO: 81329 - DNA, 120 bp, Homo sapiens; identical to SEQ ID NO: 59743
  misc_feature: 474 for SV(C|O) and mtDNA

SEQ ID NO: 81330 - DNA, 120 bp, Homo sapiens; identical to SEQ ID NO: 57697
  misc_feature: 474 for SV(C|O) and mtDNA

SEQ ID NO: 81331 - DNA, 120 bp, Homo sapiens
  misc_feature: 474 for SV(C|O) and mtDNA
gattaacctttagcaataaacgaaagtttaactaagctatactaaccccagggttggtcaatttcgtgccagccaccgcggtcacacgattaacccaagtcaatagaagccggcgtaaag

SEQ ID NO: 81332 - DNA, 120 bp, Homo sapiens; identical to SEQ ID NO: 62429
  misc_feature: 474 for SV(C|O) and mtDNA

SEQ ID NO: 81333 - DNA, 120 bp, Homo sapiens
  misc_feature: 474 for SV(C|O) and mtDNA
gagattattccgaagcctggtaggataagaatataaacttcagggtgaccgaaaaatcagaataggtgttggtatagaatggggtctcctcctccggcggggtcgaagaaggtggtgttg

SEQ ID NO: 81334 - DNA, 120 bp, Homo sapiens; identical to SEQ ID NO: 62916
  misc_feature: 474 for SV(C|O) and mtDNA

SEQ ID NO: 81335 - DNA, 120 bp, Homo sapiens
  misc_feature: 474 for SV(C|O) and mtDNA
ctccgggcccataacacttgggggtagctaaagtgaactgtatccgacatctggttcctacttcagggccataaagcctaaatagcccacacgttccccttaaataagacatcacgatgg

SEQ ID NO: 81336 - DNA, 120 bp, Homo sapiens
  misc_feature: 474 for SV(C|O) and mtDNA
ccccattcgtataataattacatcacaagacgtcttgcactcatgagctgtccccacattaggcttaaaaacagatgcaattcccggacgtctaaaccaaaccactttcaccgctacacg

SEQ ID NO: 81337 - DNA, 120 bp, Homo sapiens
  misc_feature: 474 for SV(C|O) and mtDNA
acacctctgattactcctgccatcatgacccttggccataatatgatttatctccacactagcagagaccaaccgaacccccttcgaccttgccgaaggagagtccgaactagtctcagg

SEQ ID NO: 81338 - DNA, 120 bp, Homo sapiens
  misc_feature: 474 for SV(C|O) and mtDNA
aggaaagtgacagcgagggctgtgagttttaggtagagggggattgttgtttggaagggggatgcgggggaaatgttgttagtaatgagaaatcctgcgaataggcttccggctgtcagg

SEQ ID NO: 81339 - DNA, 120 bp, Homo sapiens
  misc_feature: 474 for SV(C|O) and mtDNA
acgggccctatttcaaagatttttaggggaattaattctaggacgatgggcatgaaactgtggtttgctccacagatttcagagcattgaccgtagtatacccccggtcgtgtagcggtg

SEQ ID NO: 81340 - DNA, 120 bp, Homo sapiens
  misc_feature: 474 for SV(C|O) and mtDNA
atacctttcctcacaggtttctactccaaagaccacatcatcgaaaccgcaaacatatcatacacaaacgcctgagccctatctattactctcatcgctacctccctgacaagcgcctat

SEQ ID NO: 81341 - DNA, 120 bp, Homo sapiens; identical to SEQ ID NO: 58580
  misc_feature: 473 for SV(C|O) and mtDNA

SEQ ID NO: 81342 - DNA, 120 bp, Homo sapiens
  misc_feature: 473 for SV(C|O) and mtDNA
aaatgaacgaaaatctgttcgcttcattcattgcccccacaatcctaggcctacccgccgcagtactgatcattctatttccccctctattgatccccacctccaaatatctcatcaaca

SEQ ID NO: 81343 - DNA, 120 bp, Homo sapiens; identical to SEQ ID NO: 57711
  misc_feature: 473 for SV(C|O) and mtDNA

SEQ ID NO: 81344 - DNA, 120 bp, Homo sapiens
  misc_feature: 473 for SV(C|O) and mtDNA
attaacctttagcaataaacgaaagtttaactaagctatactaaccccagggttggtcaatttcgtgccagccaccgcggtcacacgattaacccaagtcaatagaagccggcgtaaaga

SEQ ID NO: 81345 - DNA, 120 bp, Homo sapiens
  misc_feature: 473 for SV(C|O) and mtDNA
tctccgtgccacctatcacaccccatcctaaagtaaggtcagctaaataagctatcgggcccataccccgaaaatgttggttatacccttcccgtactaattaatcccctggcccaaccc

SEQ ID NO: 81346 - DNA, 120 bp, Homo sapiens; identical to SEQ ID NO: 62389
  misc_feature: 473 for SV(C|O) and mtDNA

SEQ ID NO: 81347 - DNA, 120 bp, Homo sapiens
  misc_feature: 473 for SV(C|O) and mtDNA
ggggtagctaaagtgaactgtatccgacatctggttcctacttcagggccataaagcctaaatagcccacacgttccccttaaataagacatcacgatggatcacaggtctatcacccta

SEQ ID NO: 81348 - DNA, 120 bp, Homo sapiens
  misc_feature: 473 for SV(C|O) and mtDNA
aacacttgggggtagctaaagtgaactgtatccgacatctggttcctacttcagggccataaagcctaaatagcccacacgttccccttaaataagacatcacgatggatcacaggtcta

SEQ ID NO: 81349 - DNA, 120 bp, Homo sapiens; identical to SEQ ID NO: 58504
  misc_feature: 473 for SV(C|O) and mtDNA

SEQ ID NO: 81350 - DNA, 120 bp, Homo sapiens
  misc_feature: 473 for SV(C|O) and mtDNA
atagaggagacacctgctaggtgtaaggagaagatggttaggtctacggaggctccagggtgggagtagttccctgctaagggagggtagactgttcaacctgttcctgctccggcctcc

SEQ ID NO: 81351 - DNA, 120 bp, Homo sapiens
  misc_feature: 473 for SV(C|O) and mtDNA
gatccctcccttaccatcaaatcaattggccaccaatggtactgaacctacgagtacaccgactacggcggactaatcttcaactcctacatacttcccccattattcctagaaccaggc

SEQ ID NO: 81352 - DNA, 120 bp, Homo sapiens
  misc_feature: 473 for SV(C|O) and mtDNA
aaattataacaaaccctgagaaccaaaatgaacgaaaatctgttcgcttcattcattgcccccacaatcctaggcctacccgccgcagtactgatcattctatttccccctctattgatc

SEQ ID NO: 81353 - DNA, 120 bp, Homo sapiens
  misc_feature: 473 for SV(C|O) and mtDNA
gagtaaacggctaggctagaggtggctagaataaataggaggcctaggttgaggttgaccagggggttgggtatggggaggggggttcatagtagaagagcgatggtgagagctaaggtc

SEQ ID NO: 81354 - DNA, 120 bp, Homo sapiens
  misc_feature: 473 for SV(C|O) and mtDNA
aatcaatatcccgcacaagagtgctactctcctcgctccgggcccataacacttgggggtagctaaagtgaactgtatccgacatctggttcctacttcagggccataaagcctaaatag

SEQ ID NO: 81355 - DNA, 120 bp, Homo sapiens
  misc_feature: 473 for SV(C|O) and mtDNA
agtggggttagcgatggaggtaggattggtgctgtgggtgaaagagtatgatggggtggtggttgtggtaaactttaatagtgtaggaagctgaataatttatgaaggagaggggtcagg

SEQ ID NO: 81356 - DNA, 120 bp, Homo sapiens
  misc_feature: 473 for SV(C|O) and mtDNA
attagtccgccgtagtcggtgtactcgtaggttcagtaccattggtggccaattgatttgatggtaagggagggatcgttgacctcgtctgttatgtaaaggatgcgcagggatgggagg

SEQ ID NO: 81357 - DNA, 120 bp, Homo sapiens
  misc_feature: 473 for SV(C|O) and mtDNA
agaaggcctagataggggattgtgcggtgtgtgatggtagggtagaatccgagtatgttggagaaataaaatgtgcatagtggggattttattttaagtttgttggttaggtagttgagg

SEQ ID NO: 81358 - DNA, 120 bp, Homo sapiens
  misc_feature: 473 for SV(C|O) and mtDNA
aggtatggttttgagtagtcctcctatttttcggatatcttgttcattgttaaggttgtggatgatggacccggagcacataaatagtatggctttgaagaaggcgtgggtacagatgtg

SEQ ID NO: 81359 - DNA, 120 bp, Homo sapiens
  misc_feature: 473 for SV(C|O) and mtDNA
aaaccaaacccagctacgcaaaatcttagcatactcctcaattacccacataggatgaataatagcagttctaccgtacaaccctaacataaccattcttaatttaactatttatattat

SEQ ID NO: 81360 - DNA, 120 bp, Homo sapiens
  misc_feature: 473 for SV(C|O) and mtDNA
agccactttcgtagtctattttgtgtcagctggagttttttacaactcaggtgagttttagctttattggggagggggtgatctaaaacactctttacgccggcttctattgacttgggt

SEQ ID NO: 81361 - DNA, 120 bp, Homo sapiens
  misc_feature: 472 for SV(C|O) and mtDNA
aattctccgtgccacctatcacaccccatcctaaagtaaggtcagctaaataagctatcgggcccataccccgaaaatgttggttatacccttcccgtactaattaatcccctggcccaa

SEQ ID NO: 81362 - DNA, 120 bp, Homo sapiens; identical to SEQ ID NO: 61020
  misc_feature: 472 for SV(C|O) and mtDNA

SEQ ID NO: 81363 - DNA, 120 bp, Homo sapiens
  misc_feature: 472 for SV(C|O) and mtDNA
ctttcctcacaggtttctactccaaagaccacatcatcgaaaccgcaaacatatcatacacaaacgcctgagccctatctattactctcatcgctacctccctgacaagcgcctatagca

SEQ ID NO: 81364 - DNA, 120 bp, Homo sapiens
  misc_feature: 472 for SV(C|O) and mtDNA
tcctcgctccgggcccataacacttgggggtagctaaagtgaactgtatccgacatctggttcctacttcagggccataaagcctaaatagcccacacgttccccttaaataagacatca

SEQ ID NO: 81365 - DNA, 120 bp, Homo sapiens
  misc_feature: 472 for SV(C|O) and mtDNA
tctcacttcaacctccctcaccattggcagcctagcattagcaggaatacctttcctcacaggtttctactccaaagaccacatcatcgaaaccgcaaacatatcatacacaaacgcctg

SEQ ID NO: 81366 - DNA, 120 bp, Homo sapiens
  misc_feature: 472 for SV(C|O) and mtDNA
gttgacaatcgagtagtactcccgattgaagcccccattcgtataataattacatcacaagacgtcttgcactcatgagctgtccccacattaggcttaaaaacagatgcaattcccgga

SEQ ID NO: 81367 - DNA, 120 bp, Homo sapiens
  misc_feature: 472 for SV(C|O) and mtDNA
taagaaggcctagataggggattgtgcggtgtgtgatggtagggtagaatccgagtatgttggagaaataaaatgtgcatagtggggattttattttaagtttgttggttaggtagttga

SEQ ID NO: 81368 - DNA, 120 bp, Homo sapiens
  misc_feature: 472 for SV(C|O) and mtDNA
taaaccaaacccagctacgcaaaatcttagcatactcctcaattacccacataggatgaataatagcagttctaccgtacaaccctaacataaccattcttaatttaactatttatatta

SEQ ID NO: 81369 - DNA, 120 bp, Homo sapiens
  misc_feature: 472 for SV(C|O) and mtDNA
gttagcgatggaggtaggattggtgctgtgggtgaaagagtatgatggggtggtggttgtggtaaactttaatagtgtaggaagctgaataatttatgaaggagaggggtcagggttgat

SEQ ID NO: 81370 - DNA, 120 bp, Homo sapiens
  misc_feature: 472 for SV(C|O) and mtDNA
acctctacttctacctacgcctaatctactccacctcaatcacactactccccatatctaacaacgtaaaaataaaatgacagtttgaacatacaaaacccaccccattcctccccacac

SEQ ID NO: 81371 - DNA, 120 bp, Homo sapiens
  misc_feature: 472 for SV(C|O) and mtDNA
catcaaactcaaactacgccctgatcggcgcactgcgagcagtagcccaaacaatctcatatgaagtcaccctagccatcattctactatcaacattactaataagtggctcctttaacc

SEQ ID NO: 81372 - DNA, 120 bp, Homo sapiens
  misc_feature: 472 for SV(C|O) and mtDNA
cacataggatgaataatagcagttctaccgtacaaccctaacataaccattcttaatttaactatttatattatcctaactactaccgcattcctactactcaacttaaactccagcacc

SEQ ID NO: 81373 - DNA, 120 bp, Homo sapiens; identical to SEQ ID NO: 62591
  misc_feature: 472 for SV(C|O) and mtDNA

SEQ ID NO: 81374 - DNA, 120 bp, Homo sapiens
  misc_feature: 472 for SV(C|O) and mtDNA
gggtagctaaagtgaactgtatccgacatctggttcctacttcagggccataaagcctaaatagcccacacgttccccttaaataagacatcacgatggatcacaggtctatcaccctat

SEQ ID NO: 81375 - DNA, 120 bp, Homo sapiens
  misc_feature: 472 for SV(C|O) and mtDNA
gggggaaatgttgttagtaatgagaaatcctgcgaataggcttccggctgtcaggcgtttaatggggtttagtagggtggggttattttcgttaatgttagtaagggtggggaagcgagg

SEQ ID NO: 81376 - DNA, 120 bp, Homo sapiens
  misc_feature: 472 for SV(C|O) and mtDNA
attataacaaaccctgagaaccaaaatgaacgaaaatctgttcgcttcattcattgcccccacaatcctaggcctacccgccgcagtactgatcattctatttccccctctattgatccc

SEQ ID NO: 81377 - DNA, 120 bp, Homo sapiens
  misc_feature: 472 for SV(C|O) and mtDNA
ctttcgtagtctattttgtgtcagctggagttttttacaactcaggtgagttttagctttattggggagggggtgatctaaaacactctttacgccggcttctattgacttgggttaatc

SEQ ID NO: 81378 - DNA, 120 bp, Homo sapiens; identical to SEQ ID NO: 62407
  misc_feature: 472 for SV(C|O) and mtDNA

SEQ ID NO: 81379 - DNA, 120 bp, Homo sapiens
  misc_feature: 472 for SV(C|O) and mtDNA
ctcctcactctctcaatcttatccatcatagcaggcagttgaggtggattaaaccaaacccagctacgcaaaatcttagcatactcctcaattacccacataggatgaataatagcagtt

SEQ ID NO: 81380 - DNA, 120 bp, Homo sapiens; identical to SEQ ID NO: 62376
  misc_feature: 472 for SV(C|O) and mtDNA

SEQ ID NO: 81381 - DNA, 120 bp, Homo sapiens
  misc_feature: 472 for SV(C|O) and mtDNA
caggaatacctttcctcacaggtttctactccaaagaccacatcatcgaaaccgcaaacatatcatacacaaacgcctgagccctatctattactctcatcgctacctccctgacaagcg

SEQ ID NO: 81382 - DNA, 120 bp, Homo sapiens
  misc_feature: 472 for SV(C|O) and mtDNA
cgatccctcccttaccatcaaatcaattggccaccaatggtactgaacctacgagtacaccgactacggcggactaatcttcaactcctacatacttcccccattattcctagaaccagg

SEQ ID NO: 81383 - DNA, 120 bp, Homo sapiens; identical to SEQ ID NO: 62952
  misc_feature: 472 for SV(C|O) and mtDNA

SEQ ID NO: 81384 - DNA, 120 bp, Homo sapiens
  misc_feature: 472 for SV(C|O) and mtDNA
ccgggcccataacacttgggggtagctaaagtgaactgtatccgacatctggttcctacttcagggccataaagcctaaatagcccacacgttccccttaaataagacatcacgatggat

SEQ ID NO: 81385 - DNA, 120 bp, Homo sapiens
  misc_feature: 471 for SV(C|O) and mtDNA
ttataacaaaccctgagaaccaaaatgaacgaaaatctgttcgcttcattcattgcccccacaatcctaggcctacccgccgcagtactgatcattctatttccccctctattgatcccc

SEQ ID NO: 81386 - DNA, 120 bp, Homo sapiens; identical to SEQ ID NO: 61489
  misc_feature: 471 for SV(C|O) and mtDNA

SEQ ID NO: 81387 - DNA, 120 bp, Homo sapiens; identical to SEQ ID NO: 62652
  misc_feature: 471 for SV(C|O) and mtDNA

SEQ ID NO: 81388 - DNA, 120 bp, Homo sapiens; identical to SEQ ID NO: 58319
  misc_feature: 471 for SV(C|O) and mtDNA

SEQ ID NO: 81389 - DNA, 120 bp, Homo sapiens
  misc_feature: 471 for SV(C|O) and mtDNA
gtaagaaggcctagataggggattgtgcggtgtgtgatggtagggtagaatccgagtatgttggagaaataaaatgtgcatagtggggattttattttaagtttgttggttaggtagttg

SEQ ID NO: 81390 - DNA, 120 bp, Homo sapiens
  misc_feature: 471 for SV(C|O) and mtDNA
ggaaagtgacagcgagggctgtgagttttaggtagagggggattgttgtttggaagggggatgcgggggaaatgttgttagtaatgagaaatcctgcgaataggcttccggctgtcaggc

SEQ ID NO: 81391 - DNA, 120 bp, Homo sapiens
  misc_feature: 471 for SV(C|O) and mtDNA
gcaggaatacctttcctcacaggtttctactccaaagaccacatcatcgaaaccgcaaacatatcatacacaaacgcctgagccctatctattactctcatcgctacctccctgacaagc

SEQ ID NO: 81392 - DNA, 120 bp, Homo sapiens
  misc_feature: 471 for SV(C|O) and mtDNA
ccgaatcaaccctgacccctctccttcataaattattcagcttcctacactattaaagtttaccacaaccaccaccccatcatactctttcacccacagcaccaatcctacctccatcgc

SEQ ID NO: 81393 - DNA, 120 bp, Homo sapiens
  misc_feature: 471 for SV(C|O) and mtDNA
ctctacttctacctacgcctaatctactccacctcaatcacactactccccatatctaacaacgtaaaaataaaatgacagtttgaacatacaaaacccaccccattcctccccacactc

SEQ ID NO: 81394 - DNA, 120 bp, Homo sapiens
  misc_feature: 471 for SV(C|O) and mtDNA
cgccttcttcaaagccatactatttatgtgctccgggtccatcatccacaaccttaacaatgaacaagatatccgaaaaataggaggactactcaaaaccatacctctcacttcaacctc

SEQ ID NO: 81395 - DNA, 120 bp, Homo sapiens
  misc_feature: 471 for SV(C|O) and mtDNA
gaggtatggttttgagtagtcctcctatttttcggatatcttgttcattgttaaggttgtggatgatggacccggagcacataaatagtatggctttgaagaaggcgtgggtacagatgt

SEQ ID NO: 81396 - DNA, 120 bp, Homo sapiens
  misc_feature: 471 for SV(C|O) and mtDNA
atatgttgtgtagagttcaggggagagtgcgtcatatgttgttcctaggaagattgtagtggtgagggtgtttattataataatgtttgtgtattcggctatgaagaataaggcgaaggg

SEQ ID NO: 81397 - DNA, 120 bp, Homo sapiens
  misc_feature: 471 for SV(C|O) and mtDNA
actttcgtagtctattttgtgtcagctggagttttttacaactcaggtgagttttagctttattggggagggggtgatctaaaacactctttacgccggcttctattgacttgggttaat

SEQ ID NO: 81398 - DNA, 120 bp, Homo sapiens
  misc_feature: 471 for SV(C|O) and mtDNA
agggctgtgagttttaggtagagggggattgttgtttggaagggggatgcgggggaaatgttgttagtaatgagaaatcctgcgaataggcttccggctgtcaggcgtttaatggggttt

SEQ ID NO: 81399 - DNA, 120 bp, Homo sapiens
  misc_feature: 470 for SV(C|O) and mtDNA
gccgaaggagagtccgaactagtctcaggcttcaacatcgaatacgccgcaggccccttcgccttattcttcatagccgaatacacaaacattattataataaacaccctcaccactaca

SEQ ID NO: 81400 - DNA, 120 bp, Homo sapiens; identical to SEQ ID NO: 55857
  misc_feature: 470 for SV(C|O) and mtDNA

SEQ ID NO: 81401 - DNA, 120 bp, Homo sapiens
  misc_feature: 470 for SV(C|O) and mtDNA
tacctttcctcacaggtttctactccaaagaccacatcatcgaaaccgcaaacatatcatacacaaacgcctgagccctatctattactctcatcgctacctccctgacaagcgcctata

SEQ ID NO: 81402 - DNA, 120 bp, Homo sapiens
  misc_feature: 470 for SV(C|O) and mtDNA
tagcccaaacaatctcatatgaagtcaccctagccatcattctactatcaacattactaataagtggctcctttaacctctccacccttatcacaacacaagaacacctctgattactcc

SEQ ID NO: 81403 - DNA, 120 bp, Homo sapiens
  misc_feature: 470 for SV(C|O) and mtDNA
cacctctgattactcctgccatcatgacccttggccataatatgatttatctccacactagcagagaccaaccgaacccccttcgaccttgccgaaggagagtccgaactagtctcaggc

SEQ ID NO: 81404 - DNA, 120 bp, Homo sapiens
  misc_feature: 470 for SV(C|O) and mtDNA
ctgtcaggcgtttaatggggtttagtagggtggggttattttcgttaatgttagtaagggtggggaagcgaggttgacctgttagggtgagaagaattattcgagtgctataggcgcttg

SEQ ID NO: 81405 - DNA, 120 bp, Homo sapiens
  misc_feature: 470 for SV(C|O) and mtDNA
cgttgacaatcgagtagtactcccgattgaagcccccattcgtataataattacatcacaagacgtcttgcactcatgagctgtccccacattaggcttaaaaacagatgcaattcccgg

SEQ ID NO: 81406 - DNA, 120 bp, Homo sapiens
  misc_feature: 470 for SV(C|O) and mtDNA
caccctgatcagaggattgagtaaacggctaggctagaggtggctagaataaataggaggcctaggttgaggttgaccagggggttgggtatggggaggggggttcatagtagaagagcg

SEQ ID NO: 81407 - DNA, 120 bp, Homo sapiens
  misc_feature: 470 for SV(C|O) and mtDNA
aacagaccgcaacctcaacaccaccttcttcgaccccgccggaggaggagaccccattctataccaacacctattctgatttttcggtcaccctgaagtttatattcttatcctaccagg

SEQ ID NO: 81408 - DNA, 120 bp, Homo sapiens; identical to SEQ ID NO: 57953
  misc_feature: 470 for SV(C|O) and mtDNA

SEQ ID NO: 81409 - DNA, 120 bp, Homo sapiens
  misc_feature: 470 for SV(C|O) and mtDNA
aacacaagaacacctctgattactcctgccatcatgacccttggccataatatgatttatctccacactagcagagaccaaccgaacccccttcgaccttgccgaaggagagtccgaact

SEQ ID NO: 81410 - DNA, 120 bp, Homo sapiens
  misc_feature: 470 for SV(C|O) and mtDNA
acctctgattactcctgccatcatgacccttggccataatatgatttatctccacactagcagagaccaaccgaacccccttcgaccttgccgaaggagagtccgaactagtctcaggct

SEQ ID NO: 81411 - DNA, 120 bp, Homo sapiens
  misc_feature: 469 for SV(C|O) and mtDNA
cctttctattagctcttagtaagattacacatgcaagcatccccgttccagtgagttcaccctctaaatcaccacgatcaaaagggacaagcatcaagcacgcagcaatgcagctcaaaa

SEQ ID NO: 81412 - DNA, 120 bp, Homo sapiens
  misc_feature: 469 for SV(C|O) and mtDNA
tcgccctcccatccctgcgcatcctttacataacagacgaggtcaacgatccctcccttaccatcaaatcaattggccaccaatggtactgaacctacgagtacaccgactacggcggac

SEQ ID NO: 81413 - DNA, 120 bp, Homo sapiens
  misc_feature: 469 for SV(C|O) and mtDNA
cgggccctatttcaaagatttttaggggaattaattctaggacgatgggcatgaaactgtggtttgctccacagatttcagagcattgaccgtagtatacccccggtcgtgtagcggtga

SEQ ID NO: 81414 - DNA, 120 bp, Homo sapiens
  misc_feature: 469 for SV(C|O) and mtDNA
aaaaattataacaaaccctgagaaccaaaatgaacgaaaatctgttcgcttcattcattgcccccacaatcctaggcctacccgccgcagtactgatcattctatttccccctctattga

SEQ ID NO: 81415 - DNA, 120 bp, Homo sapiens
  misc_feature: 469 for SV(C|O) and mtDNA
ggattgagtaaacggctaggctagaggtggctagaataaataggaggcctaggttgaggttgaccagggggttgggtatggggaggggggttcatagtagaagagcgatggtgagagcta

SEQ ID NO: 81416 - DNA, 120 bp, Homo sapiens
  misc_feature: 469 for SV(C|O) and mtDNA
gtagcccaaacaatctcatatgaagtcaccctagccatcattctactatcaacattactaataagtggctcctttaacctctccacccttatcacaacacaagaacacctctgattactc

SEQ ID NO: 81417 - DNA, 120 bp, Homo sapiens; identical to SEQ ID NO: 62608
  misc_feature: 469 for SV(C|O) and mtDNA

SEQ ID NO: 81418 - DNA, 120 bp, Homo sapiens
  misc_feature: 469 for SV(C|O) and mtDNA
gaaggagagtccgaactagtctcaggcttcaacatcgaatacgccgcaggccccttcgccttattcttcatagccgaatacacaaacattattataataaacaccctcaccactacaatc

SEQ ID NO: 81419 - DNA, 120 bp, Homo sapiens
  misc_feature: 469 for SV(C|O) and mtDNA
gatagaggagacacctgctaggtgtaaggagaagatggttaggtctacggaggctccagggtgggagtagttccctgctaagggagggtagactgttcaacctgttcctgctccggcctc

SEQ ID NO: 81420 - DNA, 120 bp, Homo sapiens
  misc_feature: 469 for SV(C|O) and mtDNA
aaccaaacccagctacgcaaaatcttagcatactcctcaattacccacataggatgaataatagcagttctaccgtacaaccctaacataaccattcttaatttaactatttatattatc

SEQ ID NO: 81421 - DNA, 120 bp, Homo sapiens
  misc_feature: 469 for SV(C|O) and mtDNA
aagaaggcctagataggggattgtgcggtgtgtgatggtagggtagaatccgagtatgttggagaaataaaatgtgcatagtggggattttattttaagtttgttggttaggtagttgag

SEQ ID NO: 81422 - DNA, 120 bp, Homo sapiens
  misc_feature: 469 for SV(C|O) and mtDNA
cacaagaacacctctgattactcctgccatcatgacccttggccataatatgatttatctccacactagcagagaccaaccgaacccccttcgaccttgccgaaggagagtccgaactag

SEQ ID NO: 81423 - DNA, 120 bp, Homo sapiens; identical to SEQ ID NO: 60906
  misc_feature: 469 for SV(C|O) and mtDNA

SEQ ID NO: 81424 - DNA, 120 bp, Homo sapiens
  misc_feature: 469 for SV(C|O) and mtDNA
cagaccgcaacctcaacaccaccttcttcgaccccgccggaggaggagaccccattctataccaacacctattctgatttttcggtcaccctgaagtttatattcttatcctaccaggct

SEQ ID NO: 81425 - DNA, 120 bp, Homo sapiens; identical to SEQ ID NO: 62894
  misc_feature: 468 for SV(C|O) and mtDNA

SEQ ID NO: 81426 - DNA, 120 bp, Homo sapiens
  misc_feature: 468 for SV(C|O) and mtDNA
tagcaggaatacctttcctcacaggtttctactccaaagaccacatcatcgaaaccgcaaacatatcatacacaaacgcctgagccctatctattactctcatcgctacctccctgacaa

SEQ ID NO: 81427 - DNA, 120 bp, Homo sapiens; identical to SEQ ID NO: 60102
  misc_feature: 468 for SV(C|O) and mtDNA

SEQ ID NO: 81428 - DNA, 120 bp, Homo sapiens; identical to SEQ ID NO: 60998
  misc_feature: 468 for SV(C|O) and mtDNA

SEQ ID NO: 81429 - DNA, 120 bp, Homo sapiens
  misc_feature: 468 for SV(C|O) and mtDNA
tccctcccttaccatcaaatcaattggccaccaatggtactgaacctacgagtacaccgactacggcggactaatcttcaactcctacatacttcccccattattcctagaaccaggcga

SEQ ID NO: 81430 - DNA, 120 bp, Homo sapiens
  misc_feature: 468 for SV(C|O) and mtDNA
tcctaggacttctaacagccctagacctcaactacctaaccaacaaacttaaaataaaatccccactatgcacattttatttctccaacatactcggattctaccctaccatcacacacc

SEQ ID NO: 81431 - DNA, 120 bp, Homo sapiens
  misc_feature: 468 for SV(C|O) and mtDNA
ctcacttcaacctccctcaccattggcagcctagcattagcaggaatacctttcctcacaggtttctactccaaagaccacatcatcgaaaccgcaaacatatcatacacaaacgcctga

SEQ ID NO: 81432 - DNA, 120 bp, Homo sapiens; identical to SEQ ID NO: 62469
  misc_feature: 468 for SV(C|O) and mtDNA

SEQ ID NO: 81433 - DNA, 120 bp, Homo sapiens
  misc_feature: 468 for SV(C|O) and mtDNA
tatcacaacacaagaacacctctgattactcctgccatcatgacccttggccataatatgatttatctccacactagcagagaccaaccgaacccccttcgaccttgccgaaggagagtc

SEQ ID NO: 81434 - DNA, 120 bp, Homo sapiens
  misc_feature: 468 for SV(C|O) and mtDNA
gcagtagcccaaacaatctcatatgaagtcaccctagccatcattctactatcaacattactaataagtggctcctttaacctctccacccttatcacaacacaagaacacctctgatta

SEQ ID NO: 81435 - DNA, 120 bp, Homo sapiens
  misc_feature: 468 for SV(C|O) and mtDNA
gggctgtgagttttaggtagagggggattgttgtttggaagggggatgcgggggaaatgttgttagtaatgagaaatcctgcgaataggcttccggctgtcaggcgtttaatggggttta

SEQ ID NO: 81436 - DNA, 120 bp, Homo sapiens
  misc_feature: 468 for SV(C|O) and mtDNA
gtggggttagcgatggaggtaggattggtgctgtgggtgaaagagtatgatggggtggtggttgtggtaaactttaatagtgtaggaagctgaataatttatgaaggagaggggtcaggg

SEQ ID NO: 81437 - DNA, 120 bp, Homo sapiens
  misc_feature: 468 for SV(C|O) and mtDNA
gccttcttcaaagccatactatttatgtgctccgggtccatcatccacaaccttaacaatgaacaagatatccgaaaaataggaggactactcaaaaccatacctctcacttcaacctcc

SEQ ID NO: 81438 - DNA, 120 bp, Homo sapiens
  misc_feature: 468 for SV(C|O) and mtDNA
gctccgggcccataacacttgggggtagctaaagtgaactgtatccgacatctggttcctacttcagggccataaagcctaaatagcccacacgttccccttaaataagacatcacgatg

SEQ ID NO: 81439 - DNA, 120 bp, Homo sapiens
  misc_feature: 468 for SV(C|O) and mtDNA
gcgagggctgtgagttttaggtagagggggattgttgtttggaagggggatgcgggggaaatgttgttagtaatgagaaatcctgcgaataggcttccggctgtcaggcgtttaatgggg

SEQ ID NO: 81440 - DNA, 120 bp, Homo sapiens
  misc_feature: 468 for SV(C|O) and mtDNA
agcaggaatacctttcctcacaggtttctactccaaagaccacatcatcgaaaccgcaaacatatcatacacaaacgcctgagccctatctattactctcatcgctacctccctgacaag

SEQ ID NO: 81441 - DNA, 120 bp, Homo sapiens; identical to SEQ ID NO: 62380
  misc_feature: 468 for SV(C|O) and mtDNA

SEQ ID NO: 81442 - DNA, 120 bp, Homo sapiens
  misc_feature: 468 for SV(C|O) and mtDNA
ctacttctacctacgcctaatctactccacctcaatcacactactccccatatctaacaacgtaaaaataaaatgacagtttgaacatacaaaacccaccccattcctccccacactcat

SEQ ID NO: 81443 - DNA, 120 bp, Homo sapiens
  misc_feature: 468 for SV(C|O) and mtDNA
cgaatcaaccctgacccctctccttcataaattattcagcttcctacactattaaagtttaccacaaccaccaccccatcatactctttcacccacagcaccaatcctacctccatcgct

SEQ ID NO: 81444 - DNA, 120 bp, Homo sapiens
  misc_feature: 468 for SV(C|O) and mtDNA
aagccactttcgtagtctattttgtgtcagctggagttttttacaactcaggtgagttttagctttattggggagggggtgatctaaaacactctttacgccggcttctattgacttggg

SEQ ID NO: 81445 - DNA, 120 bp, Homo sapiens
  misc_feature: 467 for SV(C|O) and mtDNA
tttcgtttattgctaaaggttaatcactgctgtttcccgtgggggtgtggctaggctaagcgttttgagctgcattgctgcgtgcttgatgcttgtcccttttgatcgtggtgatttaga

SEQ ID NO: 81446 - DNA, 120 bp, Homo sapiens; identical to SEQ ID NO: 62921
  misc_feature: 467 for SV(C|O) and mtDNA

SEQ ID NO: 81447 - DNA, 120 bp, Homo sapiens
  misc_feature: 467 for SV(C|O) and mtDNA
taagccttctcctcactctctcaatcttatccatcatagcaggcagttgaggtggattaaaccaaacccagctacgcaaaatcttagcatactcctcaattacccacataggatgaataa

SEQ ID NO: 81448 - DNA, 120 bp, Homo sapiens
  misc_feature: 467 for SV(C|O) and mtDNA
ttagtccgccgtagtcggtgtactcgtaggttcagtaccattggtggccaattgatttgatggtaagggagggatcgttgacctcgtctgttatgtaaaggatgcgcagggatgggaggg

SEQ ID NO: 81449 - DNA, 120 bp, Homo sapiens
  misc_feature: 467 for SV(C|O) and mtDNA
accctgatcagaggattgagtaaacggctaggctagaggtggctagaataaataggaggcctaggttgaggttgaccagggggttgggtatggggaggggggttcatagtagaagagcga

SEQ ID NO: 81450 - DNA, 120 bp, Homo sapiens
  misc_feature: 467 for SV(C|O) and mtDNA
tatgttgtgtagagttcaggggagagtgcgtcatatgttgttcctaggaagattgtagtggtgagggtgtttattataataatgtttgtgtattcggctatgaagaataaggcgaagggg

SEQ ID NO: 81451 - DNA, 120 bp, Homo sapiens
  misc_feature: 467 for SV(C|O) and mtDNA
acacaagaacacctctgattactcctgccatcatgacccttggccataatatgatttatctccacactagcagagaccaaccgaacccccttcgaccttgccgaaggagagtccgaacta

SEQ ID NO: 81452 - DNA, 120 bp, Homo sapiens; identical to SEQ ID NO: 61326
  misc_feature: 467 for SV(C|O) and mtDNA

SEQ ID NO: 81453 - DNA, 120 bp, Homo sapiens
  misc_feature: 467 for SV(C|O) and mtDNA
cctcgctccgggcccataacacttgggggtagctaaagtgaactgtatccgacatctggttcctacttcagggccataaagcctaaatagcccacacgttccccttaaataagacatcac

SEQ ID NO: 81454 - DNA, 120 bp, Homo sapiens
  misc_feature: 467 for SV(C|O) and mtDNA
ggggttagcgatggaggtaggattggtgctgtgggtgaaagagtatgatggggtggtggttgtggtaaactttaatagtgtaggaagctgaataatttatgaaggagaggggtcagggtt

SEQ ID NO: 81455 - DNA, 120 bp, Homo sapiens
  misc_feature: 467 for SV(C|O) and mtDNA
atgttgtgtagagttcaggggagagtgcgtcatatgttgttcctaggaagattgtagtggtgagggtgtttattataataatgtttgtgtattcggctatgaagaataaggcgaaggggc

SEQ ID NO: 81456 - DNA, 120 bp, Homo sapiens
  misc_feature: 467 for SV(C|O) and mtDNA
gagaggtatggttttgagtagtcctcctatttttcggatatcttgttcattgttaaggttgtggatgatggacccggagcacataaatagtatggctttgaagaaggcgtgggtacagat

SEQ ID NO: 81457 - DNA, 120 bp, Homo sapiens
  misc_feature: 467 for SV(C|O) and mtDNA
cccataacacttgggggtagctaaagtgaactgtatccgacatctggttcctacttcagggccataaagcctaaatagcccacacgttccccttaaataagacatcacgatggatcacag

SEQ ID NO: 81458 - DNA, 120 bp, Homo sapiens
  misc_feature: 467 for SV(C|O) and mtDNA
ctcgctccgggcccataacacttgggggtagctaaagtgaactgtatccgacatctggttcctacttcagggccataaagcctaaatagcccacacgttccccttaaataagacatcacg

SEQ ID NO: 81459 - DNA, 120 bp, Homo sapiens
  misc_feature: 467 for SV(C|O) and mtDNA
aaagccactttcgtagtctattttgtgtcagctggagttttttacaactcaggtgagttttagctttattggggagggggtgatctaaaacactctttacgccggcttctattgacttgg

SEQ ID NO: 81460 - DNA, 120 bp, Homo sapiens
  misc_feature: 466 for SV(C|O) and mtDNA
tttcctcacaggtttctactccaaagaccacatcatcgaaaccgcaaacatatcatacacaaacgcctgagccctatctattactctcatcgctacctccctgacaagcgcctatagcac

SEQ ID NO: 81461 - DNA, 120 bp, Homo sapiens
  misc_feature: 466 for SV(C|O) and mtDNA
tgattaacctttagcaataaacgaaagtttaactaagctatactaaccccagggttggtcaatttcgtgccagccaccgcggtcacacgattaacccaagtcaatagaagccggcgtaaa

SEQ ID NO: 81462 - DNA, 120 bp, Homo sapiens
  misc_feature: 466 for SV(C|O) and mtDNA
tggggttagcgatggaggtaggattggtgctgtgggtgaaagagtatgatggggtggtggttgtggtaaactttaatagtgtaggaagctgaataatttatgaaggagaggggtcagggt

SEQ ID NO: 81463 - DNA, 120 bp, Homo sapiens
  misc_feature: 466 for SV(C|O) and mtDNA
taggacttctaacagccctagacctcaactacctaaccaacaaacttaaaataaaatccccactatgcacattttatttctccaacatactcggattctaccctaccatcacacaccgca

SEQ ID NO: 81464 - DNA, 120 bp, Homo sapiens
  misc_feature: 466 for SV(C|O) and mtDNA
agattagtccgccgtagtcggtgtactcgtaggttcagtaccattggtggccaattgatttgatggtaagggagggatcgttgacctcgtctgttatgtaaaggatgcgcagggatggga

SEQ ID NO: 81465 - DNA, 120 bp, Homo sapiens
  misc_feature: 466 for SV(C|O) and mtDNA
ggttagcgatggaggtaggattggtgctgtgggtgaaagagtatgatggggtggtggttgtggtaaactttaatagtgtaggaagctgaataatttatgaaggagaggggtcagggttga

SEQ ID NO: 81466 - DNA, 120 bp, Homo sapiens
  misc_feature: 466 for SV(C|O) and mtDNA
agattattccgaagcctggtaggataagaatataaacttcagggtgaccgaaaaatcagaataggtgttggtatagaatggggtctcctcctccggcggggtcgaagaaggtggtgttga

SEQ ID NO: 81467 - DNA, 120 bp, Homo sapiens; identical to SEQ ID NO: 57451
  misc_feature: 466 for SV(C|O) and mtDNA

SEQ ID NO: 81468 - DNA, 120 bp, Homo sapiens
  misc_feature: 466 for SV(C|O) and mtDNA
accaaacccagctacgcaaaatcttagcatactcctcaattacccacataggatgaataatagcagttctaccgtacaaccctaacataaccattcttaatttaactatttatattatcc

SEQ ID NO: 81469 - DNA, 120 bp, Homo sapiens
  misc_feature: 466 for SV(C|O) and mtDNA
cttctaacagccctagacctcaactacctaaccaacaaacttaaaataaaatccccactatgcacattttatttctccaacatactcggattctaccctaccatcacacaccgcacaatc

SEQ ID NO: 81470 - DNA, 120 bp, Homo sapiens
  misc_feature: 466 for SV(C|O) and mtDNA
ctcctcgctccgggcccataacacttgggggtagctaaagtgaactgtatccgacatctggttcctacttcagggccataaagcctaaatagcccacacgttccccttaaataagacatc

SEQ ID NO: 81471 - DNA, 120 bp, Homo sapiens
  misc_feature: 466 for SV(C|O) and mtDNA
acctttcctcacaggtttctactccaaagaccacatcatcgaaaccgcaaacatatcatacacaaacgcctgagccctatctattactctcatcgctacctccctgacaagcgcctatag

SEQ ID NO: 81472 - DNA, 120 bp, Homo sapiens
  misc_feature: 466 for SV(C|O) and mtDNA
atccctcccttaccatcaaatcaattggccaccaatggtactgaacctacgagtacaccgactacggcggactaatcttcaactcctacatacttcccccattattcctagaaccaggcg

SEQ ID NO: 81473 - DNA, 120 bp, Homo sapiens
  misc_feature: 466 for SV(C|O) and mtDNA
cgaaggagagtccgaactagtctcaggcttcaacatcgaatacgccgcaggccccttcgccttattcttcatagccgaatacacaaacattattataataaacaccctcaccactacaat

SEQ ID NO: 81474 - DNA, 120 bp, Homo sapiens
  misc_feature: 466 for SV(C|O) and mtDNA
agcgagggctgtgagttttaggtagagggggattgttgtttggaagggggatgcgggggaaatgttgttagtaatgagaaatcctgcgaataggcttccggctgtcaggcgtttaatggg

SEQ ID NO: 81475 - DNA, 120 bp, Homo sapiens
  misc_feature: 466 for SV(C|O) and mtDNA
aaaaaattataacaaaccctgagaaccaaaatgaacgaaaatctgttcgcttcattcattgcccccacaatcctaggcctacccgccgcagtactgatcattctatttccccctctattg

SEQ ID NO: 81476 - DNA, 120 bp, Homo sapiens
  misc_feature: 465 for SV(C|O) and mtDNA
taccgaacgaaaaattctaggctatatacaactacgcaaaggccccaacgttgtaggcccctacgggctactacaacccttcgctgacgccataaaactcttcaccaaagagcccctaaa

SEQ ID NO: 81477 - DNA, 120 bp, Homo sapiens; identical to SEQ ID NO: 60983
  misc_feature: 465 for SV(C|O) and mtDNA

SEQ ID NO: 81478 - DNA, 120 bp, Homo sapiens
  misc_feature: 465 for SV(C|O) and mtDNA
taggggattgtgcggtgtgtgatggtagggtagaatccgagtatgttggagaaataaaatgtgcatagtggggattttattttaagtttgttggttaggtagttgaggtctagggctgtt

SEQ ID NO: 81479 - DNA, 120 bp, Homo sapiens; identical to SEQ ID NO: 60826
  misc_feature: 465 for SV(C|O) and mtDNA

SEQ ID NO: 81480 - DNA, 120 bp, Homo sapiens
  misc_feature: 465 for SV(C|O) and mtDNA
ggcccataacacttgggggtagctaaagtgaactgtatccgacatctggttcctacttcagggccataaagcctaaatagcccacacgttccccttaaataagacatcacgatggatcac

SEQ ID NO: 81481 - DNA, 120 bp, Homo sapiens
  misc_feature: 465 for SV(C|O) and mtDNA
ggtatggttttgagtagtcctcctatttttcggatatcttgttcattgttaaggttgtggatgatggacccggagcacataaatagtatggctttgaagaaggcgtgggtacagatgtgc

SEQ ID NO: 81482 - DNA, 120 bp, Homo sapiens; identical to SEQ ID NO: 61307
  misc_feature: 465 for SV(C|O) and mtDNA

SEQ ID NO: 81483 - DNA, 120 bp, Homo sapiens
  misc_feature: 465 for SV(C|O) and mtDNA
gggggtagctaaagtgaactgtatccgacatctggttcctacttcagggccataaagcctaaatagcccacacgttccccttaaataagacatcacgatggatcacaggtctatcaccct

SEQ ID NO: 81484 - DNA, 120 bp, Homo sapiens
  misc_feature: 465 for SV(C|O) and mtDNA
atcacaacacaagaacacctctgattactcctgccatcatgacccttggccataatatgatttatctccacactagcagagaccaaccgaacccccttcgaccttgccgaaggagagtcc

SEQ ID NO: 81485 - DNA, 120 bp, Homo sapiens
  misc_feature: 465 for SV(C|O) and mtDNA
acagaccgcaacctcaacaccaccttcttcgaccccgccggaggaggagaccccattctataccaacacctattctgatttttcggtcaccctgaagtttatattcttatcctaccaggc

SEQ ID NO: 81486 - DNA, 120 bp, Homo sapiens
  misc_feature: 465 for SV(C|O) and mtDNA
gattattccgaagcctggtaggataagaatataaacttcagggtgaccgaaaaatcagaataggtgttggtatagaatggggtctcctcctccggcggggtcgaagaaggtggtgttgag

SEQ ID NO: 81487 - DNA, 120 bp, Homo sapiens
  misc_feature: 465 for SV(C|O) and mtDNA
agaggtatggttttgagtagtcctcctatttttcggatatcttgttcattgttaaggttgtggatgatggacccggagcacataaatagtatggctttgaagaaggcgtgggtacagatg

SEQ ID NO: 81488 - DNA, 120 bp, Homo sapiens
  misc_feature: 465 for SV(C|O) and mtDNA
cagcagtcctacttctcctatctctcccagtcctagctgctggcatcactatactactaacagaccgcaacctcaacaccaccttcttcgaccccgccggaggaggagaccccattctat

SEQ ID NO: 81489 - DNA, 120 bp, Homo sapiens; identical to SEQ ID NO: 55984
  misc_feature: 464 for SV(C|O) and mtDNA

SEQ ID NO: 81490 - DNA, 120 bp, Homo sapiens
  misc_feature: 464 for SV(C|O) and mtDNA
agtgattaacctttagcaataaacgaaagtttaactaagctatactaaccccagggttggtcaatttcgtgccagccaccgcggtcacacgattaacccaagtcaatagaagccggcgta

SEQ ID NO: 81491 - DNA, 120 bp, Homo sapiens
  misc_feature: 464 for SV(C|O) and mtDNA
taacagccctagacctcaactacctaaccaacaaacttaaaataaaatccccactatgcacattttatttctccaacatactcggattctaccctaccatcacacaccgcacaatcccct

SEQ ID NO: 81492 - DNA, 120 bp, Homo sapiens
  misc_feature: 464 for SV(C|O) and mtDNA
taacacttgggggtagctaaagtgaactgtatccgacatctggttcctacttcagggccataaagcctaaatagcccacacgttccccttaaataagacatcacgatggatcacaggtct

SEQ ID NO: 81493 - DNA, 120 bp, Homo sapiens
  misc_feature: 464 for SV(C|O) and mtDNA
gtgttcagatatgttaaagccactttcgtagtctattttgtgtcagctggagttttttacaactcaggtgagttttagctttattggggagggggtgatctaaaacactctttacgccgg

SEQ ID NO: 81494 - DNA, 120 bp, Homo sapiens; identical to SEQ ID NO: 61223
  misc_feature: 464 for SV(C|O) and mtDNA

SEQ ID NO: 81495 - DNA, 120 bp, Homo sapiens
  misc_feature: 464 for SV(C|O) and mtDNA
ccacataggatgaataatagcagttctaccgtacaaccctaacataaccattcttaatttaactatttatattatcctaactactaccgcattcctactactcaacttaaactccagcac

SEQ ID NO: 81496 - DNA, 120 bp, Homo sapiens; identical to SEQ ID NO: 60271
  misc_feature: 464 for SV(C|O) and mtDNA

SEQ ID NO: 81497 - DNA, 120 bp, Homo sapiens
  misc_feature: 464 for SV(C|O) and mtDNA
gggttagcgatggaggtaggattggtgctgtgggtgaaagagtatgatggggtggtggttgtggtaaactttaatagtgtaggaagctgaataatttatgaaggagaggggtcagggttg

SEQ ID NO: 81498 - DNA, 120 bp, Homo sapiens; identical to SEQ ID NO: 56259
  misc_feature: 464 for SV(C|O) and mtDNA

SEQ ID NO: 81499 - DNA, 120 bp, Homo sapiens
  misc_feature: 464 for SV(C|O) and mtDNA
cgggcccataacacttgggggtagctaaagtgaactgtatccgacatctggttcctacttcagggccataaagcctaaatagcccacacgttccccttaaataagacatcacgatggatc

SEQ ID NO: 81500 - DNA, 120 bp, Homo sapiens
  misc_feature: 464 for SV(C|O) and mtDNA
gaatccgagtatgttggagaaataaaatgtgcatagtggggattttattttaagtttgttggttaggtagttgaggtctagggctgttagaagtcctaggaaagtgacagcgagggctgt

SEQ ID NO: 81501 - DNA, 120 bp, Homo sapiens; identical to SEQ ID NO: 60810
  misc_feature: 464 for SV(C|O) and mtDNA

SEQ ID NO: 81502 - DNA, 120 bp, Homo sapiens; identical to SEQ ID NO: 62401
  misc_feature: 464 for SV(C|O) and mtDNA

SEQ ID NO: 81503 - DNA, 120 bp, Homo sapiens
  misc_feature: 464 for SV(C|O) and mtDNA
cgagggctgtgagttttaggtagagggggattgttgtttggaagggggatgcgggggaaatgttgttagtaatgagaaatcctgcgaataggcttccggctgtcaggcgtttaatggggt

SEQ ID NO: 81504 - DNA, 120 bp, Homo sapiens
  misc_feature: 463 for SV(C|O) and mtDNA
tgttgtgtagagttcaggggagagtgcgtcatatgttgttcctaggaagattgtagtggtgagggtgtttattataataatgtttgtgtattcggctatgaagaataaggcgaaggggcc

SEQ ID NO: 81505 - DNA, 120 bp, Homo sapiens
  misc_feature: 463 for SV(C|O) and mtDNA
aggagttgaagattagtccgccgtagtcggtgtactcgtaggttcagtaccattggtggccaattgatttgatggtaagggagggatcgttgacctcgtctgttatgtaaaggatgcgca

SEQ ID NO: 81506 - DNA, 120 bp, Homo sapiens; identical to SEQ ID NO: 60999
  misc_feature: 463 for SV(C|O) and mtDNA

SEQ ID NO: 81507 - DNA, 120 bp, Homo sapiens
  misc_feature: 463 for SV(C|O) and mtDNA
gatgaagttgatggcccctaagatagaggagacacctgctaggtgtaaggagaagatggttaggtctacggaggctccagggtgggagtagttccctgctaagggagggtagactgttca

SEQ ID NO: 81508 - DNA, 120 bp, Homo sapiens; identical to SEQ ID NO: 62318
  misc_feature: 463 for SV(C|O) and mtDNA

SEQ ID NO: 81509 - DNA, 120 bp, Homo sapiens; identical to SEQ ID NO: 58025
  misc_feature: 463 for SV(C|O) and mtDNA

SEQ ID NO: 81510 - DNA, 120 bp, Homo sapiens
  misc_feature: 463 for SV(C|O) and mtDNA
ataacacttgggggtagctaaagtgaactgtatccgacatctggttcctacttcagggccataaagcctaaatagcccacacgttccccttaaataagacatcacgatggatcacaggtc

SEQ ID NO: 81511 - DNA, 120 bp, Homo sapiens
  misc_feature: 463 for SV(C|O) and mtDNA
acacgattaacccaagtcaatagaagccggcgtaaagagtgttttagatcaccccctccccaataaagctaaaactcacctgagttgtaaaaaactccagctgacacaaaatagactacg

SEQ ID NO: 81512 - DNA, 120 bp, Homo sapiens
  misc_feature: 463 for SV(C|O) and mtDNA
aagattagtccgccgtagtcggtgtactcgtaggttcagtaccattggtggccaattgatttgatggtaagggagggatcgttgacctcgtctgttatgtaaaggatgcgcagggatggg

SEQ ID NO: 81513 - DNA, 120 bp, Homo sapiens; identical to SEQ ID NO: 56719
  misc_feature: 463 for SV(C|O) and mtDNA

SEQ ID NO: 81514 - DNA, 120 bp, Homo sapiens
  misc_feature: 463 for SV(C|O) and mtDNA
acgccttcttcaaagccatactatttatgtgctccgggtccatcatccacaaccttaacaatgaacaagatatccgaaaaataggaggactactcaaaaccatacctctcacttcaacct

SEQ ID NO: 81515 - DNA, 120 bp, Homo sapiens
  misc_feature: 462 for SV(C|O) and mtDNA
tgacagcgagggctgtgagttttaggtagagggggattgttgtttggaagggggatgcgggggaaatgttgttagtaatgagaaatcctgcgaataggcttccggctgtcaggcgtttaa

SEQ ID NO: 81516 - DNA, 120 bp, Homo sapiens; identical to SEQ ID NO: 56539
  misc_feature: 462 for SV(C|O) and mtDNA

SEQ ID NO: 81517 - DNA, 120 bp, Homo sapiens
  misc_feature: 462 for SV(C|O) and mtDNA
cagtagcccaaacaatctcatatgaagtcaccctagccatcattctactatcaacattactaataagtggctcctttaacctctccacccttatcacaacacaagaacacctctgattac

SEQ ID NO: 81518 - DNA, 120 bp, Homo sapiens
  misc_feature: 462 for SV(C|O) and mtDNA
gtaaacggctaggctagaggtggctagaataaataggaggcctaggttgaggttgaccagggggttgggtatggggaggggggttcatagtagaagagcgatggtgagagctaaggtcgg

SEQ ID NO: 81519 - DNA, 120 bp, Homo sapiens; identical to SEQ ID NO: 62229
  misc_feature: 462 for SV(C|O) and mtDNA

SEQ ID NO: 81520 - DNA, 120 bp, Homo sapiens; identical to SEQ ID NO: 61954
  misc_feature: 462 for SV(C|O) and mtDNA

SEQ ID NO: 81521 - DNA, 120 bp, Homo sapiens
  misc_feature: 462 for SV(C|O) and mtDNA
cccgaatcaaccctgacccctctccttcataaattattcagcttcctacactattaaagtttaccacaaccaccaccccatcatactctttcacccacagcaccaatcctacctccatcg

SEQ ID NO: 81522 - DNA, 120 bp, Homo sapiens; identical to SEQ ID NO: 62540
  misc_feature: 462 for SV(C|O) and mtDNA

SEQ ID NO: 81523 - DNA, 120 bp, Homo sapiens
  misc_feature: 462 for SV(C|O) and mtDNA
aaaattataacaaaccctgagaaccaaaatgaacgaaaatctgttcgcttcattcattgcccccacaatcctaggcctacccgccgcagtactgatcattctatttccccctctattgat

SEQ ID NO: 81524 - DNA, 120 bp, Homo sapiens
  misc_feature: 461 for SV(C|O) and mtDNA
cgattaacccaagtcaatagaagccggcgtaaagagtgttttagatcaccccctccccaataaagctaaaactcacctgagttgtaaaaaactccagctgacacaaaatagactacgaaa

SEQ ID NO: 81525 - DNA, 120 bp, Homo sapiens
  misc_feature: 461 for SV(C|O) and mtDNA
tttaggctttatggccctgaagtaggaaccagatgtcggatacagttcactttagctacccccaagtgttatgggcccggagcgaggagagtagcactcttgtgcgggatattgatttca

SEQ ID NO: 81526 - DNA, 120 bp, Homo sapiens; identical to SEQ ID NO: 62124
  misc_feature: 461 for SV(C|O) and mtDNA

SEQ ID NO: 81527 - DNA, 120 bp, Homo sapiens; identical to SEQ ID NO: 62934
  misc_feature: 461 for SV(C|O) and mtDNA

SEQ ID NO: 81528 - DNA, 120 bp, Homo sapiens
  misc_feature: 461 for SV(C|O) and mtDNA
cactttcgtagtctattttgtgtcagctggagttttttacaactcaggtgagttttagctttattggggagggggtgatctaaaacactctttacgccggcttctattgacttgggttaa

SEQ ID NO: 81529 - DNA, 120 bp, Homo sapiens
  misc_feature: 461 for SV(C|O) and mtDNA
ggacttctaacagccctagacctcaactacctaaccaacaaacttaaaataaaatccccactatgcacattttatttctccaacatactcggattctaccctaccatcacacaccgcaca

SEQ ID NO: 81530 - DNA, 120 bp, Homo sapiens
  misc_feature: 461 for SV(C|O) and mtDNA
cccacataggatgaataatagcagttctaccgtacaaccctaacataaccattcttaatttaactatttatattatcctaactactaccgcattcctactactcaacttaaactccagca

SEQ ID NO: 81531 - DNA, 120 bp, Homo sapiens
  misc_feature: 461 for SV(C|O) and mtDNA
gggcccataacacttgggggtagctaaagtgaactgtatccgacatctggttcctacttcagggccataaagcctaaatagcccacacgttccccttaaataagacatcacgatggatca

SEQ ID NO: 81532 - DNA, 120 bp, Homo sapiens
  misc_feature: 461 for SV(C|O) and mtDNA
tgagaggtatggttttgagtagtcctcctatttttcggatatcttgttcattgttaaggttgtggatgatggacccggagcacataaatagtatggctttgaagaaggcgtgggtacaga

SEQ ID NO: 81533 - DNA, 120 bp, Homo sapiens; identical to SEQ ID NO: 59908
  misc_feature: 461 for SV(C|O) and mtDNA

SEQ ID NO: 81534 - DNA, 120 bp, Homo sapiens; identical to SEQ ID NO: 57201
  misc_feature: 461 for SV(C|O) and mtDNA

SEQ ID NO: 81535 - DNA, 120 bp, Homo sapiens
  misc_feature: 461 for SV(C|O) and mtDNA
attagcaggaatacctttcctcacaggtttctactccaaagaccacatcatcgaaaccgcaaacatatcatacacaaacgcctgagccctatctattactctcatcgctacctccctgac

SEQ ID NO: 81536 - DNA, 120 bp, Homo sapiens; identical to SEQ ID NO: 61329
  misc_feature: 461 for SV(C|O) and mtDNA

SEQ ID NO: 81537 - DNA, 120 bp, Homo sapiens
  misc_feature: 461 for SV(C|O) and mtDNA
aattacccacataggatgaataatagcagttctaccgtacaaccctaacataaccattcttaatttaactatttatattatcctaactactaccgcattcctactactcaacttaaactc

SEQ ID NO: 81538 - DNA, 120 bp, Homo sapiens
  misc_feature: 461 for SV(C|O) and mtDNA
gaaggcctagataggggattgtgcggtgtgtgatggtagggtagaatccgagtatgttggagaaataaaatgtgcatagtggggattttattttaagtttgttggttaggtagttgaggt

SEQ ID NO: 81539 - DNA, 120 bp, Homo sapiens
  misc_feature: 461 for SV(C|O) and mtDNA
gaaagtgacagcgagggctgtgagttttaggtagagggggattgttgtttggaagggggatgcgggggaaatgttgttagtaatgagaaatcctgcgaataggcttccggctgtcaggcg

SEQ ID NO: 81540 - DNA, 120 bp, Homo sapiens
  misc_feature: 461 for SV(C|O) and mtDNA
ccataacacttgggggtagctaaagtgaactgtatccgacatctggttcctacttcagggccataaagcctaaatagcccacacgttccccttaaataagacatcacgatggatcacagg

SEQ ID NO: 81541 - DNA, 120 bp, Homo sapiens
  misc_feature: 461 for SV(C|O) and mtDNA
cataacacttgggggtagctaaagtgaactgtatccgacatctggttcctacttcagggccataaagcctaaatagcccacacgttccccttaaataagacatcacgatggatcacaggt

SEQ ID NO: 81542 - DNA, 120 bp, Homo sapiens
  misc_feature: 461 for SV(C|O) and mtDNA
agtagcccaaacaatctcatatgaagtcaccctagccatcattctactatcaacattactaataagtggctcctttaacctctccacccttatcacaacacaagaacacctctgattact

SEQ ID NO: 81543 - DNA, 120 bp, Homo sapiens
  misc_feature: 461 for SV(C|O) and mtDNA
aaggagagtccgaactagtctcaggcttcaacatcgaatacgccgcaggccccttcgccttattcttcatagccgaatacacaaacattattataataaacaccctcaccactacaatct

SEQ ID NO: 81544 - DNA, 120 bp, Homo sapiens
  misc_feature: 461 for SV(C|O) and mtDNA
aagtgacagcgagggctgtgagttttaggtagagggggattgttgtttggaagggggatgcgggggaaatgttgttagtaatgagaaatcctgcgaataggcttccggctgtcaggcgtt

SEQ ID NO: 81545 - DNA, 120 bp, Homo sapiens
  misc_feature: 460 for SV(C|O) and mtDNA
ttctaacagccctagacctcaactacctaaccaacaaacttaaaataaaatccccactatgcacattttatttctccaacatactcggattctaccctaccatcacacaccgcacaatcc

SEQ ID NO: 81546 - DNA, 120 bp, Homo sapiens; identical to SEQ ID NO: 61877
  misc_feature: 460 for SV(C|O) and mtDNA

SEQ ID NO: 81547 - DNA, 120 bp, Homo sapiens; identical to SEQ ID NO: 58616
  misc_feature: 460 for SV(C|O) and mtDNA

SEQ ID NO: 81548 - DNA, 120 bp, Homo sapiens
  misc_feature: 460 for SV(C|O) and mtDNA
cacaacacaagaacacctctgattactcctgccatcatgacccttggccataatatgatttatctccacactagcagagaccaaccgaacccccttcgaccttgccgaaggagagtccga

SEQ ID NO: 81549 - DNA, 120 bp, Homo sapiens; identical to SEQ ID NO: 61371
  misc_feature: 460 for SV(C|O) and mtDNA

SEQ ID NO: 81550 - DNA, 120 bp, Homo sapiens
  misc_feature: 460 for SV(C|O) and mtDNA
cccttagcagggaactactcccaccctggagcctccgtagacctaaccatcttctccttacacctagcaggtgtctcctctatcttaggggccatcaacttcatcacaacaattatcaat

SEQ ID NO: 81551 - DNA, 120 bp, Homo sapiens
  misc_feature: 460 for SV(C|O) and mtDNA
acttctaacagccctagacctcaactacctaaccaacaaacttaaaataaaatccccactatgcacattttatttctccaacatactcggattctaccctaccatcacacaccgcacaat

SEQ ID NO: 81552 - DNA, 120 bp, Homo sapiens
  misc_feature: 460 for SV(C|O) and mtDNA
ataggggattgtgcggtgtgtgatggtagggtagaatccgagtatgttggagaaataaaatgtgcatagtggggattttattttaagtttgttggttaggtagttgaggtctagggctgt

SEQ ID NO: 81553 - DNA, 120 bp, Homo sapiens
  misc_feature: 459 for SV(C|O) and mtDNA
gacttctaacagccctagacctcaactacctaaccaacaaacttaaaataaaatccccactatgcacattttatttctccaacatactcggattctaccctaccatcacacaccgcacaa

SEQ ID NO: 81554 - DNA, 120 bp, Homo sapiens
  misc_feature: 459 for SV(C|O) and mtDNA
atgaagttgatggcccctaagatagaggagacacctgctaggtgtaaggagaagatggttaggtctacggaggctccagggtgggagtagttccctgctaagggagggtagactgttcaa

SEQ ID NO: 81555 - DNA, 120 bp, Homo sapiens
  misc_feature: 459 for SV(C|O) and mtDNA
ttaaagccactttcgtagtctattttgtgtcagctggagttttttacaactcaggtgagttttagctttattggggagggggtgatctaaaacactctttacgccggcttctattgactt

SEQ ID NO: 81556 - DNA, 120 bp, Homo sapiens
  misc_feature: 459 for SV(C|O) and mtDNA
ctcccttagcagggaactactcccaccctggagcctccgtagacctaaccatcttctccttacacctagcaggtgtctcctctatcttaggggccatcaacttcatcacaacaattatca

SEQ ID NO: 81557 - DNA, 120 bp, Homo sapiens; identical to SEQ ID NO: 62585
  misc_feature: 459 for SV(C|O) and mtDNA

SEQ ID NO: 81558 - DNA, 120 bp, Homo sapiens
  misc_feature: 459 for SV(C|O) and mtDNA
taaacggctaggctagaggtggctagaataaataggaggcctaggttgaggttgaccagggggttgggtatggggaggggggttcatagtagaagagcgatggtgagagctaaggtcggg

SEQ ID NO: 81559 - DNA, 120 bp, Homo sapiens; identical to SEQ ID NO: 60110
  misc_feature: 459 for SV(C|O) and mtDNA

SEQ ID NO: 81560 - DNA, 120 bp, Homo sapiens
  misc_feature: 459 for SV(C|O) and mtDNA
ctaacagccctagacctcaactacctaaccaacaaacttaaaataaaatccccactatgcacattttatttctccaacatactcggattctaccctaccatcacacaccgcacaatcccc

SEQ ID NO: 81561 - DNA, 120 bp, Homo sapiens
  misc_feature: 459 for SV(C|O) and mtDNA
acccacataggatgaataatagcagttctaccgtacaaccctaacataaccattcttaatttaactatttatattatcctaactactaccgcattcctactactcaacttaaactccagc

SEQ ID NO: 81562 - DNA, 120 bp, Homo sapiens; identical to SEQ ID NO: 58064
  misc_feature: 459 for SV(C|O) and mtDNA

SEQ ID NO: 81563 - DNA, 120 bp, Homo sapiens
  misc_feature: 459 for SV(C|O) and mtDNA
aacacaaactaccacctacctccctcaccaaagcccataaaaataaaaaattataacaaaccctgagaaccaaaatgaacgaaaatctgttcgcttcattcattgcccccacaatcctag

SEQ ID NO: 81564 - DNA, 120 bp, Homo sapiens; identical to SEQ ID NO: 62936
  misc_feature: 459 for SV(C|O) and mtDNA

SEQ ID NO: 81565 - DNA, 120 bp, Homo sapiens
  misc_feature: 459 for SV(C|O) and mtDNA
ccaaacccagctacgcaaaatcttagcatactcctcaattacccacataggatgaataatagcagttctaccgtacaaccctaacataaccattcttaatttaactatttatattatcct

SEQ ID NO: 81566 - DNA, 120 bp, Homo sapiens; identical to SEQ ID NO: 61018
  misc_feature: 458 for SV(C|O) and mtDNA

SEQ ID NO: 81567 - DNA, 120 bp, Homo sapiens
  misc_feature: 458 for SV(C|O) and mtDNA
ttaggctttatggccctgaagtaggaaccagatgtcggatacagttcactttagctacccccaagtgttatgggcccggagcgaggagagtagcactcttgtgcgggatattgatttcac

SEQ ID NO: 81568 - DNA, 120 bp, Homo sapiens
  misc_feature: 458 for SV(C|O) and mtDNA
ttacccacataggatgaataatagcagttctaccgtacaaccctaacataaccattcttaatttaactatttatattatcctaactactaccgcattcctactactcaacttaaactcca

SEQ ID NO: 81569 - DNA, 120 bp, Homo sapiens
  misc_feature: 458 for SV(C|O) and mtDNA
tgcgtgcttgatgcttgtcccttttgatcgtggtgatttagagggtgaactcactggaacggggatgcttgcatgtgtaatcttactaagagctaatagaaaggctaggaccaaacctat

SEQ ID NO: 81570 - DNA, 120 bp, Homo sapiens
  misc_feature: 458 for SV(C|O) and mtDNA
tctaacagccctagacctcaactacctaaccaacaaacttaaaataaaatccccactatgcacattttatttctccaacatactcggattctaccctaccatcacacaccgcacaatccc

SEQ ID NO: 81571 - DNA, 120 bp, Homo sapiens
  misc_feature: 458 for SV(C|O) and mtDNA
tcacttcaacctccctcaccattggcagcctagcattagcaggaatacctttcctcacaggtttctactccaaagaccacatcatcgaaaccgcaaacatatcatacacaaacgcctgag

SEQ ID NO: 81572 - DNA, 120 bp, Homo sapiens; identical to SEQ ID NO: 62950
  misc_feature: 458 for SV(C|O) and mtDNA

SEQ ID NO: 81573 - DNA, 120 bp, Homo sapiens
  misc_feature: 458 for SV(C|O) and mtDNA
agcagtcctacttctcctatctctcccagtcctagctgctggcatcactatactactaacagaccgcaacctcaacaccaccttcttcgaccccgccggaggaggagaccccattctata

SEQ ID NO: 81574 - DNA, 120 bp, Homo sapiens
  misc_feature: 458 for SV(C|O) and mtDNA
taggagttgaagattagtccgccgtagtcggtgtactcgtaggttcagtaccattggtggccaattgatttgatggtaagggagggatcgttgacctcgtctgttatgtaaaggatgcgc

SEQ ID NO: 81575 - DNA, 120 bp, Homo sapiens
  misc_feature: 458 for SV(C|O) and mtDNA
gtgacagcgagggctgtgagttttaggtagagggggattgttgtttggaagggggatgcgggggaaatgttgttagtaatgagaaatcctgcgaataggcttccggctgtcaggcgttta

SEQ ID NO: 81576 - DNA, 120 bp, Homo sapiens
  misc_feature: 458 for SV(C|O) and mtDNA
ccacgccttcttcaaagccatactatttatgtgctccgggtccatcatccacaaccttaacaatgaacaagatatccgaaaaataggaggactactcaaaaccatacctctcacttcaac

SEQ ID NO: 81577 - DNA, 120 bp, Homo sapiens
  misc_feature: 458 for SV(C|O) and mtDNA
aggacttctaacagccctagacctcaactacctaaccaacaaacttaaaataaaatccccactatgcacattttatttctccaacatactcggattctaccctaccatcacacaccgcac

SEQ ID NO: 81578 - DNA, 120 bp, Homo sapiens
  misc_feature: 458 for SV(C|O) and mtDNA
gaagttgatggcccctaagatagaggagacacctgctaggtgtaaggagaagatggttaggtctacggaggctccagggtgggagtagttccctgctaagggagggtagactgttcaacc

SEQ ID NO: 81579 - DNA, 120 bp, Homo sapiens
  misc_feature: 458 for SV(C|O) and mtDNA
ctttcgtttattgctaaaggttaatcactgctgtttcccgtgggggtgtggctaggctaagcgttttgagctgcattgctgcgtgcttgatgcttgtcccttttgatcgtggtgatttag

SEQ ID NO: 81580 - DNA, 120 bp, Homo sapiens
  misc_feature: 458 for SV(C|O) and mtDNA
cctaggacttctaacagccctagacctcaactacctaaccaacaaacttaaaataaaatccccactatgcacattttatttctccaacatactcggattctaccctaccatcacacaccg

SEQ ID NO: 81581 - DNA, 120 bp, Homo sapiens
  misc_feature: 458 for SV(C|O) and mtDNA
agtgacagcgagggctgtgagttttaggtagagggggattgttgtttggaagggggatgcgggggaaatgttgttagtaatgagaaatcctgcgaataggcttccggctgtcaggcgttt

SEQ ID NO: 81582 - DNA, 120 bp, Homo sapiens
  misc_feature: 458 for SV(C|O) and mtDNA
agatagaggagacacctgctaggtgtaaggagaagatggttaggtctacggaggctccagggtgggagtagttccctgctaagggagggtagactgttcaacctgttcctgctccggcct

SEQ ID NO: 81583 - DNA, 120 bp, Homo sapiens
  misc_feature: 458 for SV(C|O) and mtDNA
aactttcgtttattgctaaaggttaatcactgctgtttcccgtgggggtgtggctaggctaagcgttttgagctgcattgctgcgtgcttgatgcttgtcccttttgatcgtggtgattt

SEQ ID NO: 81584 - DNA, 120 bp, Homo sapiens
  misc_feature: 457 for SV(C|O) and mtDNA
ccgaaggagagtccgaactagtctcaggcttcaacatcgaatacgccgcaggccccttcgccttattcttcatagccgaatacacaaacattattataataaacaccctcaccactacaa

SEQ ID NO: 81585 - DNA, 120 bp, Homo sapiens
  misc_feature: 457 for SV(C|O) and mtDNA
tcccttagcagggaactactcccaccctggagcctccgtagacctaaccatcttctccttacacctagcaggtgtctcctctatcttaggggccatcaacttcatcacaacaattatcaa

SEQ ID NO: 81586 - DNA, 120 bp, Homo sapiens
  misc_feature: 457 for SV(C|O) and mtDNA
acaacacaagaacacctctgattactcctgccatcatgacccttggccataatatgatttatctccacactagcagagaccaaccgaacccccttcgaccttgccgaaggagagtccgaa

SEQ ID NO: 81587 - DNA, 120 bp, Homo sapiens
  misc_feature: 457 for SV(C|O) and mtDNA
gtgattaacctttagcaataaacgaaagtttaactaagctatactaaccccagggttggtcaatttcgtgccagccaccgcggtcacacgattaacccaagtcaatagaagccggcgtaa

SEQ ID NO: 81588 - DNA, 120 bp, Homo sapiens
  misc_feature: 457 for SV(C|O) and mtDNA
tgtgagttttaggtagagggggattgttgtttggaagggggatgcgggggaaatgttgttagtaatgagaaatcctgcgaataggcttccggctgtcaggcgtttaatggggtttagtag

SEQ ID NO: 81589 - DNA, 120 bp, Homo sapiens
  misc_feature: 457 for SV(C|O) and mtDNA
tcacaacacaagaacacctctgattactcctgccatcatgacccttggccataatatgatttatctccacactagcagagaccaaccgaacccccttcgaccttgccgaaggagagtccg

SEQ ID NO: 81590 - DNA, 120 bp, Homo sapiens
  misc_feature: 457 for SV(C|O) and mtDNA
tagtccgccgtagtcggtgtactcgtaggttcagtaccattggtggccaattgatttgatggtaagggagggatcgttgacctcgtctgttatgtaaaggatgcgcagggatgggagggc

SEQ ID NO: 81591 - DNA, 120 bp, Homo sapiens
  misc_feature: 457 for SV(C|O) and mtDNA
taggctttatggccctgaagtaggaaccagatgtcggatacagttcactttagctacccccaagtgttatgggcccggagcgaggagagtagcactcttgtgcgggatattgatttcacg

SEQ ID NO: 81592 - DNA, 120 bp, Homo sapiens
  misc_feature: 457 for SV(C|O) and mtDNA
actttcgtttattgctaaaggttaatcactgctgtttcccgtgggggtgtggctaggctaagcgttttgagctgcattgctgcgtgcttgatgcttgtcccttttgatcgtggtgattta

SEQ ID NO: 81593 - DNA, 120 bp, Homo sapiens
  misc_feature: 457 for SV(C|O) and mtDNA
taaagccactttcgtagtctattttgtgtcagctggagttttttacaactcaggtgagttttagctttattggggagggggtgatctaaaacactctttacgccggcttctattgacttg

SEQ ID NO: 81594 - DNA, 120 bp, Homo sapiens
  misc_feature: 457 for SV(C|O) and mtDNA
caacacaagaacacctctgattactcctgccatcatgacccttggccataatatgatttatctccacactagcagagaccaaccgaacccccttcgaccttgccgaaggagagtccgaac

SEQ ID NO: 81595 - DNA, 120 bp, Homo sapiens
  misc_feature: 457 for SV(C|O) and mtDNA
ggctgtgagttttaggtagagggggattgttgtttggaagggggatgcgggggaaatgttgttagtaatgagaaatcctgcgaataggcttccggctgtcaggcgtttaatggggtttag

SEQ ID NO: 81596 - DNA, 120 bp, Homo sapiens
  misc_feature: 457 for SV(C|O) and mtDNA
agtaaacggctaggctagaggtggctagaataaataggaggcctaggttgaggttgaccagggggttgggtatggggaggggggttcatagtagaagagcgatggtgagagctaaggtcg

SEQ ID NO: 81597 - DNA, 120 bp, Homo sapiens; identical to SEQ ID NO: 57090
  misc_feature: 457 for SV(C|O) and mtDNA

SEQ ID NO: 81598 - DNA, 120 bp, Homo sapiens; identical to SEQ ID NO: 62459
  misc_feature: 457 for SV(C|O) and mtDNA

SEQ ID NO: 81599 - DNA, 120 bp, Homo sapiens
  misc_feature: 457 for SV(C|O) and mtDNA
agaccgcaacctcaacaccaccttcttcgaccccgccggaggaggagaccccattctataccaacacctattctgatttttcggtcaccctgaagtttatattcttatcctaccaggctt

SEQ ID NO: 81600 - DNA, 120 bp, Homo sapiens
  misc_feature: 456 for SV(C|O) and mtDNA
tgttcagatatgttaaagccactttcgtagtctattttgtgtcagctggagttttttacaactcaggtgagttttagctttattggggagggggtgatctaaaacactctttacgccggc

SEQ ID NO: 81601 - DNA, 120 bp, Homo sapiens
  misc_feature: 456 for SV(C|O) and mtDNA
tgacaatcgagtagtactcccgattgaagcccccattcgtataataattacatcacaagacgtcttgcactcatgagctgtccccacattaggcttaaaaacagatgcaattcccggacg

SEQ ID NO: 81602 - DNA, 120 bp, Homo sapiens
  misc_feature: 456 for SV(C|O) and mtDNA
tcgctccgggcccataacacttgggggtagctaaagtgaactgtatccgacatctggttcctacttcagggccataaagcctaaatagcccacacgttccccttaaataagacatcacga

SEQ ID NO: 81603 - DNA, 120 bp, Homo sapiens; identical to SEQ ID NO: 62972
  misc_feature: 456 for SV(C|O) and mtDNA

SEQ ID NO: 81604 - DNA, 120 bp, Homo sapiens
  misc_feature: 456 for SV(C|O) and mtDNA
gtgagttttaggtagagggggattgttgtttggaagggggatgcgggggaaatgttgttagtaatgagaaatcctgcgaataggcttccggctgtcaggcgtttaatggggtttagtagg

SEQ ID NO: 81605 - DNA, 120 bp, Homo sapiens
  misc_feature: 456 for SV(C|O) and mtDNA
cgctccgggcccataacacttgggggtagctaaagtgaactgtatccgacatctggttcctacttcagggccataaagcctaaatagcccacacgttccccttaaataagacatcacgat

SEQ ID NO: 81606 - DNA, 120 bp, Homo sapiens
  misc_feature: 456 for SV(C|O) and mtDNA
cagcgagggctgtgagttttaggtagagggggattgttgtttggaagggggatgcgggggaaatgttgttagtaatgagaaatcctgcgaataggcttccggctgtcaggcgtttaatgg

SEQ ID NO: 81607 - DNA, 120 bp, Homo sapiens; identical to SEQ ID NO: 58276
  misc_feature: 456 for SV(C|O) and mtDNA

SEQ ID NO: 81608 - DNA, 120 bp, Homo sapiens
  misc_feature: 456 for SV(C|O) and mtDNA
aaagtgacagcgagggctgtgagttttaggtagagggggattgttgtttggaagggggatgcgggggaaatgttgttagtaatgagaaatcctgcgaataggcttccggctgtcaggcgt

SEQ ID NO: 81609 - DNA, 120 bp, Homo sapiens
  misc_feature: 455 for SV(C|O) and mtDNA
ttcctagggggttgtttgatcccgtttcgtgcaagaataggaggtggagtgctgctagggctgcaataatgaagggcaagatgaagtgaaaggtaaagaatcgtgtgagggtgggactgt

SEQ ID NO: 81610 - DNA, 120 bp, Homo sapiens
  misc_feature: 455 for SV(C|O) and mtDNA
ttattccgaagcctggtaggataagaatataaacttcagggtgaccgaaaaatcagaataggtgttggtatagaatggggtctcctcctccggcggggtcgaagaaggtggtgttgaggt

SEQ ID NO: 81611 - DNA, 120 bp, Homo sapiens
  misc_feature: 455 for SV(C|O) and mtDNA
tgaagttgatggcccctaagatagaggagacacctgctaggtgtaaggagaagatggttaggtctacggaggctccagggtgggagtagttccctgctaagggagggtagactgttcaac

SEQ ID NO: 81612 - DNA, 120 bp, Homo sapiens; identical to SEQ ID NO: 60893
  misc_feature: 455 for SV(C|O) and mtDNA

SEQ ID NO: 81613 - DNA, 120 bp, Homo sapiens; identical to SEQ ID NO: 59165
  misc_feature: 455 for SV(C|O) and mtDNA

SEQ ID NO: 81614 - DNA, 120 bp, Homo sapiens
  misc_feature: 455 for SV(C|O) and mtDNA
cacgccttcttcaaagccatactatttatgtgctccgggtccatcatccacaaccttaacaatgaacaagatatccgaaaaataggaggactactcaaaaccatacctctcacttcaacc

SEQ ID NO: 81615 - DNA, 120 bp, Homo sapiens
  misc_feature: 455 for SV(C|O) and mtDNA
ggagttgaagattagtccgccgtagtcggtgtactcgtaggttcagtaccattggtggccaattgatttgatggtaagggagggatcgttgacctcgtctgttatgtaaaggatgcgcag

SEQ ID NO: 81616 - DNA, 120 bp, Homo sapiens
  misc_feature: 455 for SV(C|O) and mtDNA
cctcccttagcagggaactactcccaccctggagcctccgtagacctaaccatcttctccttacacctagcaggtgtctcctctatcttaggggccatcaacttcatcacaacaattatc

SEQ ID NO: 81617 - DNA, 120 bp, Homo sapiens
  misc_feature: 455 for SV(C|O) and mtDNA
gaccgcaacctcaacaccaccttcttcgaccccgccggaggaggagaccccattctataccaacacctattctgatttttcggtcaccctgaagtttatattcttatcctaccaggcttc

SEQ ID NO: 81618 - DNA, 120 bp, Homo sapiens
  misc_feature: 455 for SV(C|O) and mtDNA
gacagcgagggctgtgagttttaggtagagggggattgttgtttggaagggggatgcgggggaaatgttgttagtaatgagaaatcctgcgaataggcttccggctgtcaggcgtttaat

SEQ ID NO: 81619 - DNA, 120 bp, Homo sapiens
  misc_feature: 455 for SV(C|O) and mtDNA
attattccgaagcctggtaggataagaatataaacttcagggtgaccgaaaaatcagaataggtgttggtatagaatggggtctcctcctccggcggggtcgaagaaggtggtgttgagg

SEQ ID NO: 81620 - DNA, 120 bp, Homo sapiens
  misc_feature: 455 for SV(C|O) and mtDNA
ccagtcctagctgctggcatcactatactactaacagaccgcaacctcaacaccaccttcttcgaccccgccggaggaggagaccccattctataccaacacctattctgatttttcggt

SEQ ID NO: 81621 - DNA, 120 bp, Homo sapiens
  misc_feature: 455 for SV(C|O) and mtDNA
cagtgattaacctttagcaataaacgaaagtttaactaagctatactaaccccagggttggtcaatttcgtgccagccaccgcggtcacacgattaacccaagtcaatagaagccggcgt

SEQ ID NO: 81622 - DNA, 120 bp, Homo sapiens; identical to SEQ ID NO: 61180
  misc_feature: 455 for SV(C|O) and mtDNA

SEQ ID NO: 81623 - DNA, 120 bp, Homo sapiens; identical to SEQ ID NO: 58821
  misc_feature: 454 for SV(C|O) and mtDNA

SEQ ID NO: 81624 - DNA, 120 bp, Homo sapiens
  misc_feature: 454 for SV(C|O) and mtDNA
tgctaagattttgcgtagctgggtttggtttaatccacctcaactgcctgctatgatggataagattgagagagtgaggagaaggcttacgtttagtgagggagagatttggtatatgat

SEQ ID NO: 81625 - DNA, 120 bp, Homo sapiens; identical to SEQ ID NO: 62018
  misc_feature: 454 for SV(C|O) and mtDNA

SEQ ID NO: 81626 - DNA, 120 bp, Homo sapiens; identical to SEQ ID NO: 59713
  misc_feature: 454 for SV(C|O) and mtDNA

SEQ ID NO: 81627 - DNA, 120 bp, Homo sapiens; identical to SEQ ID NO: 62507
  misc_feature: 454 for SV(C|O) and mtDNA

SEQ ID NO: 81628 - DNA, 120 bp, Homo sapiens; identical to SEQ ID NO: 62947
  misc_feature: 454 for SV(C|O) and mtDNA

SEQ ID NO: 81629 - DNA, 120 bp, Homo sapiens
  misc_feature: 454 for SV(C|O) and mtDNA
ctaggacttctaacagccctagacctcaactacctaaccaacaaacttaaaataaaatccccactatgcacattttatttctccaacatactcggattctaccctaccatcacacaccgc

SEQ ID NO: 81630 - DNA, 120 bp, Homo sapiens; identical to SEQ ID NO: 57245
  misc_feature: 454 for SV(C|O) and mtDNA

SEQ ID NO: 81631 - DNA, 120 bp, Homo sapiens; identical to SEQ ID NO: 62466
  misc_feature: 454 for SV(C|O) and mtDNA

SEQ ID NO: 81632 - DNA, 120 bp, Homo sapiens
  misc_feature: 454 for SV(C|O) and mtDNA
cagtcctagctgctggcatcactatactactaacagaccgcaacctcaacaccaccttcttcgaccccgccggaggaggagaccccattctataccaacacctattctgatttttcggtc

SEQ ID NO: 81633 - DNA, 120 bp, Homo sapiens; identical to SEQ ID NO: 57977
  misc_feature: 454 for SV(C|O) and mtDNA

SEQ ID NO: 81634 - DNA, 120 bp, Homo sapiens
  misc_feature: 454 for SV(C|O) and mtDNA
cgccctcccatccctgcgcatcctttacataacagacgaggtcaacgatccctcccttaccatcaaatcaattggccaccaatggtactgaacctacgagtacaccgactacggcggact

SEQ ID NO: 81635 - DNA, 120 bp, Homo sapiens; identical to SEQ ID NO: 60316
  misc_feature: 453 for SV(C|O) and mtDNA

SEQ ID NO: 81636 - DNA, 120 bp, Homo sapiens
  misc_feature: 453 for SV(C|O) and mtDNA
tgtgatgaagttgatggcccctaagatagaggagacacctgctaggtgtaaggagaagatggttaggtctacggaggctccagggtgggagtagttccctgctaagggagggtagactgt

SEQ ID NO: 81637 - DNA, 120 bp, Homo sapiens; identical to SEQ ID NO: 62941
  misc_feature: 453 for SV(C|O) and mtDNA

SEQ ID NO: 81638 - DNA, 120 bp, Homo sapiens
  misc_feature: 453 for SV(C|O) and mtDNA
aacctcaacaccaccttcttcgaccccgccggaggaggagaccccattctataccaacacctattctgatttttcggtcaccctgaagtttatattcttatcctaccaggcttcggaata

SEQ ID NO: 81639 - DNA, 120 bp, Homo sapiens; identical to SEQ ID NO: 58683
  misc_feature: 453 for SV(C|O) and mtDNA

SEQ ID NO: 81640 - DNA, 120 bp, Homo sapiens; identical to SEQ ID NO: 60094
  misc_feature: 453 for SV(C|O) and mtDNA

SEQ ID NO: 81641 - DNA, 120 bp, Homo sapiens
  misc_feature: 453 for SV(C|O) and mtDNA
gcgtgcttgatgcttgtcccttttgatcgtggtgatttagagggtgaactcactggaacggggatgcttgcatgtgtaatcttactaagagctaatagaaaggctaggaccaaacctatt

SEQ ID NO: 81642 - DNA, 120 bp, Homo sapiens; identical to SEQ ID NO: 57793
  misc_feature: 453 for SV(C|O) and mtDNA

SEQ ID NO: 81643 - DNA, 120 bp, Homo sapiens; identical to SEQ ID NO: 62942
  misc_feature: 453 for SV(C|O) and mtDNA

SEQ ID NO: 81644 - DNA, 120 bp, Homo sapiens
  misc_feature: 453 for SV(C|O) and mtDNA
accgcaacctcaacaccaccttcttcgaccccgccggaggaggagaccccattctataccaacacctattctgatttttcggtcaccctgaagtttatattcttatcctaccaggcttcg

SEQ ID NO: 81645 - DNA, 120 bp, Homo sapiens
  misc_feature: 453 for SV(C|O) and mtDNA
agcagtagcccaaacaatctcatatgaagtcaccctagccatcattctactatcaacattactaataagtggctcctttaacctctccacccttatcacaacacaagaacacctctgatt

SEQ ID NO: 81646 - DNA, 120 bp, Homo sapiens; identical to SEQ ID NO: 60501
  misc_feature: 452 for SV(C|O) and mtDNA

SEQ ID NO: 81647 - DNA, 120 bp, Homo sapiens
  misc_feature: 452 for SV(C|O) and mtDNA
ttcaacctccctcaccattggcagcctagcattagcaggaatacctttcctcacaggtttctactccaaagaccacatcatcgaaaccgcaaacatatcatacacaaacgcctgagccct

SEQ ID NO: 81648 - DNA, 120 bp, Homo sapiens
  misc_feature: 452 for SV(C|O) and mtDNA
tgatgaagttgatggcccctaagatagaggagacacctgctaggtgtaaggagaagatggttaggtctacggaggctccagggtgggagtagttccctgctaagggagggtagactgttc

SEQ ID NO: 81649 - DNA, 120 bp, Homo sapiens; identical to SEQ ID NO: 62432
  misc_feature: 452 for SV(C|O) and mtDNA

SEQ ID NO: 81650 - DNA, 120 bp, Homo sapiens
  misc_feature: 452 for SV(C|O) and mtDNA
gcgggggaaatgttgttagtaatgagaaatcctgcgaataggcttccggctgtcaggcgtttaatggggtttagtagggtggggttattttcgttaatgttagtaagggtggggaagcga

SEQ ID NO: 81651 - DNA, 120 bp, Homo sapiens
  misc_feature: 452 for SV(C|O) and mtDNA
caaacccagctacgcaaaatcttagcatactcctcaattacccacataggatgaataatagcagttctaccgtacaaccctaacataaccattcttaatttaactatttatattatccta

SEQ ID NO: 81652 - DNA, 120 bp, Homo sapiens
  misc_feature: 452 for SV(C|O) and mtDNA
ccactttcgtagtctattttgtgtcagctggagttttttacaactcaggtgagttttagctttattggggagggggtgatctaaaacactctttacgccggcttctattgacttgggtta

SEQ ID NO: 81653 - DNA, 120 bp, Homo sapiens; identical to SEQ ID NO: 60354
  misc_feature: 452 for SV(C|O) and mtDNA

SEQ ID NO: 81654 - DNA, 120 bp, Homo sapiens
  misc_feature: 452 for SV(C|O) and mtDNA
gttcagatatgttaaagccactttcgtagtctattttgtgtcagctggagttttttacaactcaggtgagttttagctttattggggagggggtgatctaaaacactctttacgccggct

SEQ ID NO: 81655 - DNA, 120 bp, Homo sapiens
  misc_feature: 452 for SV(C|O) and mtDNA
gggggattgttgtttggaagggggatgcgggggaaatgttgttagtaatgagaaatcctgcgaataggcttccggctgtcaggcgtttaatggggtttagtagggtggggttattttcgt

SEQ ID NO: 81656 - DNA, 120 bp, Homo sapiens
  misc_feature: 452 for SV(C|O) and mtDNA
aagatagaggagacacctgctaggtgtaaggagaagatggttaggtctacggaggctccagggtgggagtagttccctgctaagggagggtagactgttcaacctgttcctgctccggcc

SEQ ID NO: 81657 - DNA, 120 bp, Homo sapiens
  misc_feature: 452 for SV(C|O) and mtDNA
gccactttcgtagtctattttgtgtcagctggagttttttacaactcaggtgagttttagctttattggggagggggtgatctaaaacactctttacgccggcttctattgacttgggtt

SEQ ID NO: 81658 - DNA, 120 bp, Homo sapiens
  misc_feature: 452 for SV(C|O) and mtDNA
gagtatgctaagattttgcgtagctgggtttggtttaatccacctcaactgcctgctatgatggataagattgagagagtgaggagaaggcttacgtttagtgagggagagatttggtat

SEQ ID NO: 81659 - DNA, 120 bp, Homo sapiens; identical to SEQ ID NO: 59085
  misc_feature: 451 for SV(C|O) and mtDNA

SEQ ID NO: 81660 - DNA, 120 bp, Homo sapiens
  misc_feature: 451 for SV(C|O) and mtDNA
acgattaacccaagtcaatagaagccggcgtaaagagtgttttagatcaccccctccccaataaagctaaaactcacctgagttgtaaaaaactccagctgacacaaaatagactacgaa

SEQ ID NO: 81661 - DNA, 120 bp, Homo sapiens; identical to SEQ ID NO: 58494
  misc_feature: 451 for SV(C|O) and mtDNA

SEQ ID NO: 81662 - DNA, 120 bp, Homo sapiens; identical to SEQ ID NO: 59233
  misc_feature: 451 for SV(C|O) and mtDNA

SEQ ID NO: 81663 - DNA, 120 bp, Homo sapiens; identical to SEQ ID NO: 59168
  misc_feature: 451 for SV(C|O) and mtDNA

SEQ ID NO: 81664 - DNA, 120 bp, Homo sapiens
  misc_feature: 451 for SV(C|O) and mtDNA
taggaaccagatgtcggatacagttcactttagctacccccaagtgttatgggcccggagcgaggagagtagcactcttgtgcgggatattgatttcacggaggatggtggtcaagggac

SEQ ID NO: 81665 - DNA, 120 bp, Homo sapiens; identical to SEQ ID NO: 59115
  misc_feature: 451 for SV(C|O) and mtDNA

SEQ ID NO: 81666 - DNA, 120 bp, Homo sapiens; identical to SEQ ID NO: 60828
  misc_feature: 451 for SV(C|O) and mtDNA

SEQ ID NO: 81667 - DNA, 120 bp, Homo sapiens; identical to SEQ ID NO: 59913
  misc_feature: 451 for SV(C|O) and mtDNA

SEQ ID NO: 81668 - DNA, 120 bp, Homo sapiens
  misc_feature: 451 for SV(C|O) and mtDNA
aggaaccagatgtcggatacagttcactttagctacccccaagtgttatgggcccggagcgaggagagtagcactcttgtgcgggatattgatttcacggaggatggtggtcaagggacc

SEQ ID NO: 81669 - DNA, 120 bp, Homo sapiens
  misc_feature: 451 for SV(C|O) and mtDNA
atgcgggggaaatgttgttagtaatgagaaatcctgcgaataggcttccggctgtcaggcgtttaatggggtttagtagggtggggttattttcgttaatgttagtaagggtggggaagc

SEQ ID NO: 81670 - DNA, 120 bp, Homo sapiens; identical to SEQ ID NO: 58005
  misc_feature: 451 for SV(C|O) and mtDNA

SEQ ID NO: 81671 - DNA, 120 bp, Homo sapiens; identical to SEQ ID NO: 62948
  misc_feature: 451 for SV(C|O) and mtDNA

SEQ ID NO: 81672 - DNA, 120 bp, Homo sapiens
  misc_feature: 451 for SV(C|O) and mtDNA
acagcgagggctgtgagttttaggtagagggggattgttgtttggaagggggatgcgggggaaatgttgttagtaatgagaaatcctgcgaataggcttccggctgtcaggcgtttaatg

SEQ ID NO: 81673 - DNA, 120 bp, Homo sapiens; identical to SEQ ID NO: 59861
  misc_feature: 451 for SV(C|O) and mtDNA

SEQ ID NO: 81674 - DNA, 120 bp, Homo sapiens
  misc_feature: 450 for SV(C|O) and mtDNA
ttcagatatgttaaagccactttcgtagtctattttgtgtcagctggagttttttacaactcaggtgagttttagctttattggggagggggtgatctaaaacactctttacgccggctt

SEQ ID NO: 81675 - DNA, 120 bp, Homo sapiens; identical to SEQ ID NO: 60818
  misc_feature: 450 for SV(C|O) and mtDNA

SEQ ID NO: 81676 - DNA, 120 bp, Homo sapiens
  misc_feature: 450 for SV(C|O) and mtDNA
tgagttttaggtagagggggattgttgtttggaagggggatgcgggggaaatgttgttagtaatgagaaatcctgcgaataggcttccggctgtcaggcgtttaatggggtttagtaggg

SEQ ID NO: 81677 - DNA, 120 bp, Homo sapiens; identical to SEQ ID NO: 60263
  misc_feature: 450 for SV(C|O) and mtDNA

SEQ ID NO: 81678 - DNA, 120 bp, Homo sapiens
  misc_feature: 450 for SV(C|O) and mtDNA
gttgtgtagagttcaggggagagtgcgtcatatgttgttcctaggaagattgtagtggtgagggtgtttattataataatgtttgtgtattcggctatgaagaataaggcgaaggggcct

SEQ ID NO: 81679 - DNA, 120 bp, Homo sapiens; identical to SEQ ID NO: 62437
  misc_feature: 450 for SV(C|O) and mtDNA

SEQ ID NO: 81680 - DNA, 120 bp, Homo sapiens
  misc_feature: 450 for SV(C|O) and mtDNA
aaggcctagataggggattgtgcggtgtgtgatggtagggtagaatccgagtatgttggagaaataaaatgtgcatagtggggattttattttaagtttgttggttaggtagttgaggtc

SEQ ID NO: 81681 - DNA, 120 bp, Homo sapiens
  misc_feature: 450 for SV(C|O) and mtDNA
ccctcccttagcagggaactactcccaccctggagcctccgtagacctaaccatcttctccttacacctagcaggtgtctcctctatcttaggggccatcaacttcatcacaacaattat

SEQ ID NO: 81682 - DNA, 120 bp, Homo sapiens; identical to SEQ ID NO: 62943
  misc_feature: 450 for SV(C|O) and mtDNA

SEQ ID NO: 81683 - DNA, 120 bp, Homo sapiens
  misc_feature: 449 for SV(C|O) and mtDNA
ggatgcgggggaaatgttgttagtaatgagaaatcctgcgaataggcttccggctgtcaggcgtttaatggggtttagtagggtggggttattttcgttaatgttagtaagggtggggaa

SEQ ID NO: 81684 - DNA, 120 bp, Homo sapiens; identical to SEQ ID NO: 59931
  misc_feature: 449 for SV(C|O) and mtDNA

SEQ ID NO: 81685 - DNA, 120 bp, Homo sapiens
  misc_feature: 449 for SV(C|O) and mtDNA
gttaaagccactttcgtagtctattttgtgtcagctggagttttttacaactcaggtgagttttagctttattggggagggggtgatctaaaacactctttacgccggcttctattgact

SEQ ID NO: 81686 - DNA, 120 bp, Homo sapiens
  misc_feature: 449 for SV(C|O) and mtDNA
gtgatgaagttgatggcccctaagatagaggagacacctgctaggtgtaaggagaagatggttaggtctacggaggctccagggtgggagtagttccctgctaagggagggtagactgtt

SEQ ID NO: 81687 - DNA, 120 bp, Homo sapiens
  misc_feature: 449 for SV(C|O) and mtDNA
ggggattgttgtttggaagggggatgcgggggaaatgttgttagtaatgagaaatcctgcgaataggcttccggctgtcaggcgtttaatggggtttagtagggtggggttattttcgtt

SEQ ID NO: 81688 - DNA, 120 bp, Homo sapiens; identical to SEQ ID NO: 58662
  misc_feature: 449 for SV(C|O) and mtDNA

SEQ ID NO: 81689 - DNA, 120 bp, Homo sapiens
  misc_feature: 449 for SV(C|O) and mtDNA
gaagattagtccgccgtagtcggtgtactcgtaggttcagtaccattggtggccaattgatttgatggtaagggagggatcgttgacctcgtctgttatgtaaaggatgcgcagggatgg

SEQ ID NO: 81690 - DNA, 120 bp, Homo sapiens
  misc_feature: 449 for SV(C|O) and mtDNA
aggcctagataggggattgtgcggtgtgtgatggtagggtagaatccgagtatgttggagaaataaaatgtgcatagtggggattttattttaagtttgttggttaggtagttgaggtct

SEQ ID NO: 81691 - DNA, 120 bp, Homo sapiens
  misc_feature: 449 for SV(C|O) and mtDNA
aggagagtccgaactagtctcaggcttcaacatcgaatacgccgcaggccccttcgccttattcttcatagccgaatacacaaacattattataataaacaccctcaccactacaatctt

SEQ ID NO: 81692 - DNA, 120 bp, Homo sapiens
  misc_feature: 448 for SV(C|O) and mtDNA
tggagtagggctgagactggggtggggccttctatggctgaggggagtcaggggtggagacctaattgggctgatttgcctgctgctgctaggaggaggcctagtagtggggtgaggctt

SEQ ID NO: 81693 - DNA, 120 bp, Homo sapiens; identical to SEQ ID NO: 62387
  misc_feature: 448 for SV(C|O) and mtDNA

SEQ ID NO: 81694 - DNA, 120 bp, Homo sapiens; identical to SEQ ID NO: 60261
  misc_feature: 448 for SV(C|O) and mtDNA

SEQ ID NO: 81695 - DNA, 120 bp, Homo sapiens; identical to SEQ ID NO: 59045
  misc_feature: 448 for SV(C|O) and mtDNA

SEQ ID NO: 81696 - DNA, 120 bp, Homo sapiens
  misc_feature: 448 for SV(C|O) and mtDNA
tgaagattagtccgccgtagtcggtgtactcgtaggttcagtaccattggtggccaattgatttgatggtaagggagggatcgttgacctcgtctgttatgtaaaggatgcgcagggatg

SEQ ID NO: 81697 - DNA, 120 bp, Homo sapiens
  misc_feature: 448 for SV(C|O) and mtDNA
cacgattaacccaagtcaatagaagccggcgtaaagagtgttttagatcaccccctccccaataaagctaaaactcacctgagttgtaaaaaactccagctgacacaaaatagactacga

SEQ ID NO: 81698 - DNA, 120 bp, Homo sapiens; identical to SEQ ID NO: 60823
  misc_feature: 448 for SV(C|O) and mtDNA

SEQ ID NO: 81699 - DNA, 120 bp, Homo sapiens
  misc_feature: 448 for SV(C|O) and mtDNA
tattgataattgttgtgatgaagttgatggcccctaagatagaggagacacctgctaggtgtaaggagaagatggttaggtctacggaggctccagggtgggagtagttccctgctaagg

SEQ ID NO: 81700 - DNA, 120 bp, Homo sapiens
  misc_feature: 448 for SV(C|O) and mtDNA
agtatgctaagattttgcgtagctgggtttggtttaatccacctcaactgcctgctatgatggataagattgagagagtgaggagaaggcttacgtttagtgagggagagatttggtata

SEQ ID NO: 81701 - DNA, 120 bp, Homo sapiens
  misc_feature: 448 for SV(C|O) and mtDNA
tacccacataggatgaataatagcagttctaccgtacaaccctaacataaccattcttaatttaactatttatattatcctaactactaccgcattcctactactcaacttaaactccag

SEQ ID NO: 81702 - DNA, 120 bp, Homo sapiens; identical to SEQ ID NO: 59715
  misc_feature: 448 for SV(C|O) and mtDNA

SEQ ID NO: 81703 - DNA, 120 bp, Homo sapiens; identical to SEQ ID NO: 62945
  misc_feature: 448 for SV(C|O) and mtDNA

SEQ ID NO: 81704 - DNA, 120 bp, Homo sapiens
  misc_feature: 448 for SV(C|O) and mtDNA
ggagcaggaacaggttgaacagtctaccctcccttagcagggaactactcccaccctggagcctccgtagacctaaccatcttctccttacacctagcaggtgtctcctctatcttaggg

SEQ ID NO: 81705 - DNA, 120 bp, Homo sapiens; identical to SEQ ID NO: 53810
  misc_feature: 448 for SV(C|O) and mtDNA

SEQ ID NO: 81706 - DNA, 120 bp, Homo sapiens
  misc_feature: 448 for SV(C|O) and mtDNA
gatatgttaaagccactttcgtagtctattttgtgtcagctggagttttttacaactcaggtgagttttagctttattggggagggggtgatctaaaacactctttacgccggcttctat

SEQ ID NO: 81707 - DNA, 120 bp, Homo sapiens
  misc_feature: 448 for SV(C|O) and mtDNA
gataggggattgtgcggtgtgtgatggtagggtagaatccgagtatgttggagaaataaaatgtgcatagtggggattttattttaagtttgttggttaggtagttgaggtctagggctg

SEQ ID NO: 81708 - DNA, 120 bp, Homo sapiens
  misc_feature: 448 for SV(C|O) and mtDNA
gagcagtagcccaaacaatctcatatgaagtcaccctagccatcattctactatcaacattactaataagtggctcctttaacctctccacccttatcacaacacaagaacacctctgat

SEQ ID NO: 81709 - DNA, 120 bp, Homo sapiens
  misc_feature: 448 for SV(C|O) and mtDNA
cgggggaaatgttgttagtaatgagaaatcctgcgaataggcttccggctgtcaggcgtttaatggggtttagtagggtggggttattttcgttaatgttagtaagggtggggaagcgag

SEQ ID NO: 81710 - DNA, 120 bp, Homo sapiens
  misc_feature: 448 for SV(C|O) and mtDNA
caattacccacataggatgaataatagcagttctaccgtacaaccctaacataaccattcttaatttaactatttatattatcctaactactaccgcattcctactactcaacttaaact

SEQ ID NO: 81711 - DNA, 120 bp, Homo sapiens
  misc_feature: 447 for SV(C|O) and mtDNA
accgaacgaaaaattctaggctatatacaactacgcaaaggccccaacgttgtaggcccctacgggctactacaacccttcgctgacgccataaaactcttcaccaaagagcccctaaaa

SEQ ID NO: 81712 - DNA, 120 bp, Homo sapiens; identical to SEQ ID NO: 58877
  misc_feature: 447 for SV(C|O) and mtDNA

SEQ ID NO: 81713 - DNA, 120 bp, Homo sapiens
  misc_feature: 447 for SV(C|O) and mtDNA
tttatggccctgaagtaggaaccagatgtcggatacagttcactttagctacccccaagtgttatgggcccggagcgaggagagtagcactcttgtgcgggatattgatttcacggagga

SEQ ID NO: 81714 - DNA, 120 bp, Homo sapiens
  misc_feature: 447 for SV(C|O) and mtDNA
ttgaagattagtccgccgtagtcggtgtactcgtaggttcagtaccattggtggccaattgatttgatggtaagggagggatcgttgacctcgtctgttatgtaaaggatgcgcagggat

SEQ ID NO: 81715 - DNA, 120 bp, Homo sapiens; identical to SEQ ID NO: 59110
  misc_feature: 447 for SV(C|O) and mtDNA

SEQ ID NO: 81716 - DNA, 120 bp, Homo sapiens; identical to SEQ ID NO: 59680
  misc_feature: 447 for SV(C|O) and mtDNA

SEQ ID NO: 81717 - DNA, 120 bp, Homo sapiens; identical to SEQ ID NO: 60320
  misc_feature: 447 for SV(C|O) and mtDNA

SEQ ID NO: 81718 - DNA, 120 bp, Homo sapiens
  misc_feature: 447 for SV(C|O) and mtDNA
agatatgttaaagccactttcgtagtctattttgtgtcagctggagttttttacaactcaggtgagttttagctttattggggagggggtgatctaaaacactctttacgccggcttcta

SEQ ID NO: 81719 - DNA, 120 bp, Homo sapiens
  misc_feature: 447 for SV(C|O) and mtDNA
ccgaacgaaaaattctaggctatatacaactacgcaaaggccccaacgttgtaggcccctacgggctactacaacccttcgctgacgccataaaactcttcaccaaagagcccctaaaac

SEQ ID NO: 81720 - DNA, 120 bp, Homo sapiens
  misc_feature: 447 for SV(C|O) and mtDNA
gtatgctaagattttgcgtagctgggtttggtttaatccacctcaactgcctgctatgatggataagattgagagagtgaggagaaggcttacgtttagtgagggagagatttggtatat

SEQ ID NO: 81721 - DNA, 120 bp, Homo sapiens; identical to SEQ ID NO: 62501
  misc_feature: 447 for SV(C|O) and mtDNA

SEQ ID NO: 81722 - DNA, 120 bp, Homo sapiens
  misc_feature: 447 for SV(C|O) and mtDNA
acttcaacctccctcaccattggcagcctagcattagcaggaatacctttcctcacaggtttctactccaaagaccacatcatcgaaaccgcaaacatatcatacacaaacgcctgagcc

SEQ ID NO: 81723 - DNA, 120 bp, Homo sapiens
  misc_feature: 447 for SV(C|O) and mtDNA
attacccacataggatgaataatagcagttctaccgtacaaccctaacataaccattcttaatttaactatttatattatcctaactactaccgcattcctactactcaacttaaactcc

SEQ ID NO: 81724 - DNA, 120 bp, Homo sapiens
  misc_feature: 447 for SV(C|O) and mtDNA
ggaacaggttgaacagtctaccctcccttagcagggaactactcccaccctggagcctccgtagacctaaccatcttctccttacacctagcaggtgtctcctctatcttaggggccatc

SEQ ID NO: 81725 - DNA, 120 bp, Homo sapiens
  misc_feature: 447 for SV(C|O) and mtDNA
gctgtgagttttaggtagagggggattgttgtttggaagggggatgcgggggaaatgttgttagtaatgagaaatcctgcgaataggcttccggctgtcaggcgtttaatggggtttagt

SEQ ID NO: 81726 - DNA, 120 bp, Homo sapiens
  misc_feature: 447 for SV(C|O) and mtDNA
gatgcgggggaaatgttgttagtaatgagaaatcctgcgaataggcttccggctgtcaggcgtttaatggggtttagtagggtggggttattttcgttaatgttagtaagggtggggaag

SEQ ID NO: 81727 - DNA, 120 bp, Homo sapiens; identical to SEQ ID NO: 61073
  misc_feature: 447 for SV(C|O) and mtDNA

SEQ ID NO: 81728 - DNA, 120 bp, Homo sapiens
  misc_feature: 447 for SV(C|O) and mtDNA
aggctttatggccctgaagtaggaaccagatgtcggatacagttcactttagctacccccaagtgttatgggcccggagcgaggagagtagcactcttgtgcgggatattgatttcacgg

SEQ ID NO: 81729 - DNA, 120 bp, Homo sapiens
  misc_feature: 447 for SV(C|O) and mtDNA
ccgcaacctcaacaccaccttcttcgaccccgccggaggaggagaccccattctataccaacacctattctgatttttcggtcaccctgaagtttatattcttatcctaccaggcttcgg

SEQ ID NO: 81730 - DNA, 120 bp, Homo sapiens
  misc_feature: 447 for SV(C|O) and mtDNA
aagttgatggcccctaagatagaggagacacctgctaggtgtaaggagaagatggttaggtctacggaggctccagggtgggagtagttccctgctaagggagggtagactgttcaacct

SEQ ID NO: 81731 - DNA, 120 bp, Homo sapiens
  misc_feature: 447 for SV(C|O) and mtDNA
aaactttcgtttattgctaaaggttaatcactgctgtttcccgtgggggtgtggctaggctaagcgttttgagctgcattgctgcgtgcttgatgcttgtcccttttgatcgtggtgatt

SEQ ID NO: 81732 - DNA, 120 bp, Homo sapiens
  misc_feature: 446 for SV(C|O) and mtDNA
cagtctaccctcccttagcagggaactactcccaccctggagcctccgtagacctaaccatcttctccttacacctagcaggtgtctcctctatcttaggggccatcaacttcatcacaa

SEQ ID NO: 81733 - DNA, 120 bp, Homo sapiens
  misc_feature: 446 for SV(C|O) and mtDNA
cccacgccttcttcaaagccatactatttatgtgctccgggtccatcatccacaaccttaacaatgaacaagatatccgaaaaataggaggactactcaaaaccatacctctcacttcaa

SEQ ID NO: 81734 - DNA, 120 bp, Homo sapiens
  misc_feature: 446 for SV(C|O) and mtDNA
tgttaaagccactttcgtagtctattttgtgtcagctggagttttttacaactcaggtgagttttagctttattggggagggggtgatctaaaacactctttacgccggcttctattgac

SEQ ID NO: 81735 - DNA, 120 bp, Homo sapiens
  misc_feature: 446 for SV(C|O) and mtDNA
tgcgggggaaatgttgttagtaatgagaaatcctgcgaataggcttccggctgtcaggcgtttaatggggtttagtagggtggggttattttcgttaatgttagtaagggtggggaagcg

SEQ ID NO: 81736 - DNA, 120 bp, Homo sapiens
  misc_feature: 446 for SV(C|O) and mtDNA
atgctaagattttgcgtagctgggtttggtttaatccacctcaactgcctgctatgatggataagattgagagagtgaggagaaggcttacgtttagtgagggagagatttggtatatga

SEQ ID NO: 81737 - DNA, 120 bp, Homo sapiens
  misc_feature: 446 for SV(C|O) and mtDNA
tagggctcaggcgtttgtgtatgatatgtttgcggtttcgatgatgtggtctttggagtagaaacctgtgaggaaaggtattcctgctaatgctaggctgccaatggtgagggaggttga

SEQ ID NO: 81738 - DNA, 120 bp, Homo sapiens
  misc_feature: 446 for SV(C|O) and mtDNA
tatgttaaagccactttcgtagtctattttgtgtcagctggagttttttacaactcaggtgagttttagctttattggggagggggtgatctaaaacactctttacgccggcttctattg

SEQ ID NO: 81739 - DNA, 120 bp, Homo sapiens
  misc_feature: 446 for SV(C|O) and mtDNA
tatgctaagattttgcgtagctgggtttggtttaatccacctcaactgcctgctatgatggataagattgagagagtgaggagaaggcttacgtttagtgagggagagatttggtatatg

SEQ ID NO: 81740 - DNA, 120 bp, Homo sapiens
  misc_feature: 446 for SV(C|O) and mtDNA
tagataggggattgtgcggtgtgtgatggtagggtagaatccgagtatgttggagaaataaaatgtgcatagtggggattttattttaagtttgttggttaggtagttgaggtctagggc

SEQ ID NO: 81741 - DNA, 120 bp, Homo sapiens
  misc_feature: 446 for SV(C|O) and mtDNA
taaaaaattataacaaaccctgagaaccaaaatgaacgaaaatctgttcgcttcattcattgcccccacaatcctaggcctacccgccgcagtactgatcattctatttccccctctatt

SEQ ID NO: 81742 - DNA, 120 bp, Homo sapiens; identical to SEQ ID NO: 61735
  misc_feature: 446 for SV(C|O) and mtDNA

SEQ ID NO: 81743 - DNA, 120 bp, Homo sapiens; identical to SEQ ID NO: 62932
  misc_feature: 446 for SV(C|O) and mtDNA

SEQ ID NO: 81744 - DNA, 120 bp, Homo sapiens
  misc_feature: 446 for SV(C|O) and mtDNA
ctagcattagcaggaatacctttcctcacaggtttctactccaaagaccacatcatcgaaaccgcaaacatatcatacacaaacgcctgagccctatctattactctcatcgctacctcc

SEQ ID NO: 81745 - DNA, 120 bp, Homo sapiens
  misc_feature: 446 for SV(C|O) and mtDNA
cacttcaacctccctcaccattggcagcctagcattagcaggaatacctttcctcacaggtttctactccaaagaccacatcatcgaaaccgcaaacatatcatacacaaacgcctgagc

SEQ ID NO: 81746 - DNA, 120 bp, Homo sapiens
  misc_feature: 446 for SV(C|O) and mtDNA
gagtggagtagggctgagactggggtggggccttctatggctgaggggagtcaggggtggagacctaattgggctgatttgcctgctgctgctaggaggaggcctagtagtggggtgagg

SEQ ID NO: 81747 - DNA, 120 bp, Homo sapiens
  misc_feature: 446 for SV(C|O) and mtDNA
ctgcgagcagtagcccaaacaatctcatatgaagtcaccctagccatcattctactatcaacattactaataagtggctcctttaacctctccacccttatcacaacacaagaacacctc

SEQ ID NO: 81748 - DNA, 120 bp, Homo sapiens; identical to SEQ ID NO: 61290
  misc_feature: 446 for SV(C|O) and mtDNA

SEQ ID NO: 81749 - DNA, 120 bp, Homo sapiens; identical to SEQ ID NO: 60991
  misc_feature: 446 for SV(C|O) and mtDNA

SEQ ID NO: 81750 - DNA, 120 bp, Homo sapiens; identical to SEQ ID NO: 62966
  misc_feature: 446 for SV(C|O) and mtDNA

SEQ ID NO: 81751 - DNA, 120 bp, Homo sapiens; identical to SEQ ID NO: 58195
  misc_feature: 446 for SV(C|O) and mtDNA

SEQ ID NO: 81752 - DNA, 120 bp, Homo sapiens
  misc_feature: 445 for SV(C|O) and mtDNA
tgcgagcagtagcccaaacaatctcatatgaagtcaccctagccatcattctactatcaacattactaataagtggctcctttaacctctccacccttatcacaacacaagaacacctct

SEQ ID NO: 81753 - DNA, 120 bp, Homo sapiens; identical to SEQ ID NO: 59904
  misc_feature: 445 for SV(C|O) and mtDNA

SEQ ID NO: 81754 - DNA, 120 bp, Homo sapiens
  misc_feature: 445 for SV(C|O) and mtDNA
gaacaggttgaacagtctaccctcccttagcagggaactactcccaccctggagcctccgtagacctaaccatcttctccttacacctagcaggtgtctcctctatcttaggggccatca

SEQ ID NO: 81755 - DNA, 120 bp, Homo sapiens; identical to SEQ ID NO: 59193
  misc_feature: 445 for SV(C|O) and mtDNA

SEQ ID NO: 81756 - DNA, 120 bp, Homo sapiens; identical to SEQ ID NO: 61817
  misc_feature: 445 for SV(C|O) and mtDNA

SEQ ID NO: 81757 - DNA, 120 bp, Homo sapiens
  misc_feature: 445 for SV(C|O) and mtDNA
gctaagattttgcgtagctgggtttggtttaatccacctcaactgcctgctatgatggataagattgagagagtgaggagaaggcttacgtttagtgagggagagatttggtatatgatt

SEQ ID NO: 81758 - DNA, 120 bp, Homo sapiens
  misc_feature: 445 for SV(C|O) and mtDNA
gcctagataggggattgtgcggtgtgtgatggtagggtagaatccgagtatgttggagaaataaaatgtgcatagtggggattttattttaagtttgttggttaggtagttgaggtctag

SEQ ID NO: 81759 - DNA, 120 bp, Homo sapiens; identical to SEQ ID NO: 58996
  misc_feature: 445 for SV(C|O) and mtDNA

SEQ ID NO: 81760 - DNA, 120 bp, Homo sapiens; identical to SEQ ID NO: 62940
  misc_feature: 445 for SV(C|O) and mtDNA

SEQ ID NO: 81761 - DNA, 120 bp, Homo sapiens; identical to SEQ ID NO: 62933
  misc_feature: 445 for SV(C|O) and mtDNA

SEQ ID NO: 81762 - DNA, 120 bp, Homo sapiens
  misc_feature: 445 for SV(C|O) and mtDNA
agacgggctcacatcaccccataaacaaataggtttggtcctagcctttctattagctcttagtaagattacacatgcaagcatccccgttccagtgagttcaccctctaaatcaccacg

SEQ ID NO: 81763 - DNA, 120 bp, Homo sapiens
  misc_feature: 445 for SV(C|O) and mtDNA
cggagcaggaacaggttgaacagtctaccctcccttagcagggaactactcccaccctggagcctccgtagacctaaccatcttctccttacacctagcaggtgtctcctctatcttagg

SEQ ID NO: 81764 - DNA, 120 bp, Homo sapiens
  misc_feature: 445 for SV(C|O) and mtDNA
aggaacaggttgaacagtctaccctcccttagcagggaactactcccaccctggagcctccgtagacctaaccatcttctccttacacctagcaggtgtctcctctatcttaggggccat

SEQ ID NO: 81765 - DNA, 120 bp, Homo sapiens; identical to SEQ ID NO: 58402
  misc_feature: 445 for SV(C|O) and mtDNA

SEQ ID NO: 81766 - DNA, 120 bp, Homo sapiens
  misc_feature: 445 for SV(C|O) and mtDNA
actgcgagcagtagcccaaacaatctcatatgaagtcaccctagccatcattctactatcaacattactaataagtggctcctttaacctctccacccttatcacaacacaagaacacct

SEQ ID NO: 81767 - DNA, 120 bp, Homo sapiens; identical to SEQ ID NO: 58518
  misc_feature: 445 for SV(C|O) and mtDNA

SEQ ID NO: 81768 - DNA, 120 bp, Homo sapiens
  misc_feature: 445 for SV(C|O) and mtDNA
aaggcacccctctgacatccggcctgcttcttctcacatgacaaaaactagcccccatctcaatcatataccaaatctctccctcactaaacgtaagccttctcctcactctctcaatct

SEQ ID NO: 81769 - DNA, 120 bp, Homo sapiens; identical to SEQ ID NO: 59599
  misc_feature: 444 for SV(C|O) and mtDNA

SEQ ID NO: 81770 - DNA, 120 bp, Homo sapiens; identical to SEQ ID NO: 62930
  misc_feature: 444 for SV(C|O) and mtDNA

SEQ ID NO: 81771 - DNA, 120 bp, Homo sapiens; identical to SEQ ID NO: 61698
  misc_feature: 444 for SV(C|O) and mtDNA

SEQ ID NO: 81772 - DNA, 120 bp, Homo sapiens; identical to SEQ ID NO: 61000
  misc_feature: 444 for SV(C|O) and mtDNA

SEQ ID NO: 81773 - DNA, 120 bp, Homo sapiens
  misc_feature: 444 for SV(C|O) and mtDNA
gttgaagattagtccgccgtagtcggtgtactcgtaggttcagtaccattggtggccaattgatttgatggtaagggagggatcgttgacctcgtctgttatgtaaaggatgcgcaggga

SEQ ID NO: 81774 - DNA, 120 bp, Homo sapiens
  misc_feature: 444 for SV(C|O) and mtDNA
gggatgcgggggaaatgttgttagtaatgagaaatcctgcgaataggcttccggctgtcaggcgtttaatggggtttagtagggtggggttattttcgttaatgttagtaagggtgggga

SEQ ID NO: 81775 - DNA, 120 bp, Homo sapiens
  misc_feature: 444 for SV(C|O) and mtDNA
cgagcagtagcccaaacaatctcatatgaagtcaccctagccatcattctactatcaacattactaataagtggctcctttaacctctccacccttatcacaacacaagaacacctctga

SEQ ID NO: 81776 - DNA, 120 bp, Homo sapiens; identical to SEQ ID NO: 61856
  misc_feature: 444 for SV(C|O) and mtDNA

SEQ ID NO: 81777 - DNA, 120 bp, Homo sapiens
  misc_feature: 444 for SV(C|O) and mtDNA
taagatagaggagacacctgctaggtgtaaggagaagatggttaggtctacggaggctccagggtgggagtagttccctgctaagggagggtagactgttcaacctgttcctgctccggc

SEQ ID NO: 81778 - DNA, 120 bp, Homo sapiens; identical to SEQ ID NO: 61996
  misc_feature: 444 for SV(C|O) and mtDNA

SEQ ID NO: 81779 - DNA, 120 bp, Homo sapiens; identical to SEQ ID NO: 60620
  misc_feature: 444 for SV(C|O) and mtDNA

SEQ ID NO: 81780 - DNA, 120 bp, Homo sapiens
  misc_feature: 444 for SV(C|O) and mtDNA
ggagtagggctgagactggggtggggccttctatggctgaggggagtcaggggtggagacctaattgggctgatttgcctgctgctgctaggaggaggcctagtagtggggtgaggcttg

SEQ ID NO: 81781 - DNA, 120 bp, Homo sapiens
  misc_feature: 444 for SV(C|O) and mtDNA
cacaaactaccacctacctccctcaccaaagcccataaaaataaaaaattataacaaaccctgagaaccaaaatgaacgaaaatctgttcgcttcattcattgcccccacaatcctaggc

SEQ ID NO: 81782 - DNA, 120 bp, Homo sapiens
  misc_feature: 444 for SV(C|O) and mtDNA
caaggcacccctctgacatccggcctgcttcttctcacatgacaaaaactagcccccatctcaatcatataccaaatctctccctcactaaacgtaagccttctcctcactctctcaatc

SEQ ID NO: 81783 - DNA, 120 bp, Homo sapiens; identical to SEQ ID NO: 59149
  misc_feature: 444 for SV(C|O) and mtDNA

SEQ ID NO: 81784 - DNA, 120 bp, Homo sapiens
  misc_feature: 444 for SV(C|O) and mtDNA
atattgataattgttgtgatgaagttgatggcccctaagatagaggagacacctgctaggtgtaaggagaagatggttaggtctacggaggctccagggtgggagtagttccctgctaag

SEQ ID NO: 81785 - DNA, 120 bp, Homo sapiens; identical to SEQ ID NO: 61014
  misc_feature: 444 for SV(C|O) and mtDNA

SEQ ID NO: 81786 - DNA, 120 bp, Homo sapiens; identical to SEQ ID NO: 60815
  misc_feature: 444 for SV(C|O) and mtDNA

SEQ ID NO: 81787 - DNA, 120 bp, Homo sapiens; identical to SEQ ID NO: 59388
  misc_feature: 443 for SV(C|O) and mtDNA

SEQ ID NO: 81788 - DNA, 120 bp, Homo sapiens; identical to SEQ ID NO: 60101
  misc_feature: 443 for SV(C|O) and mtDNA

SEQ ID NO: 81789 - DNA, 120 bp, Homo sapiens; identical to SEQ ID NO: 59575
  misc_feature: 443 for SV(C|O) and mtDNA

SEQ ID NO: 81790 - DNA, 120 bp, Homo sapiens; identical to SEQ ID NO: 62944
  misc_feature: 443 for SV(C|O) and mtDNA

SEQ ID NO: 81791 - DNA, 120 bp, Homo sapiens
  misc_feature: 443 for SV(C|O) and mtDNA
ctgtgagttttaggtagagggggattgttgtttggaagggggatgcgggggaaatgttgttagtaatgagaaatcctgcgaataggcttccggctgtcaggcgtttaatggggtttagta

SEQ ID NO: 81792 - DNA, 120 bp, Homo sapiens; identical to SEQ ID NO: 60642
  misc_feature: 443 for SV(C|O) and mtDNA

SEQ ID NO: 81793 - DNA, 120 bp, Homo sapiens
  misc_feature: 443 for SV(C|O) and mtDNA
gcagtcctacttctcctatctctcccagtcctagctgctggcatcactatactactaacagaccgcaacctcaacaccaccttcttcgaccccgccggaggaggagaccccattctatac

SEQ ID NO: 81794 - DNA, 120 bp, Homo sapiens
  misc_feature: 443 for SV(C|O) and mtDNA
ggggatgcgggggaaatgttgttagtaatgagaaatcctgcgaataggcttccggctgtcaggcgtttaatggggtttagtagggtggggttattttcgttaatgttagtaagggtgggg

SEQ ID NO: 81795 - DNA, 120 bp, Homo sapiens
  misc_feature: 443 for SV(C|O) and mtDNA
cttcaacctccctcaccattggcagcctagcattagcaggaatacctttcctcacaggtttctactccaaagaccacatcatcgaaaccgcaaacatatcatacacaaacgcctgagccc

SEQ ID NO: 81796 - DNA, 120 bp, Homo sapiens; identical to SEQ ID NO: 62937
  misc_feature: 443 for SV(C|O) and mtDNA

SEQ ID NO: 81797 - DNA, 120 bp, Homo sapiens
  misc_feature: 443 for SV(C|O) and mtDNA
gagggggattgttgtttggaagggggatgcgggggaaatgttgttagtaatgagaaatcctgcgaataggcttccggctgtcaggcgtttaatggggtttagtagggtggggttattttc

SEQ ID NO: 81798 - DNA, 120 bp, Homo sapiens
  misc_feature: 443 for SV(C|O) and mtDNA
ctagataggggattgtgcggtgtgtgatggtagggtagaatccgagtatgttggagaaataaaatgtgcatagtggggattttattttaagtttgttggttaggtagttgaggtctaggg

SEQ ID NO: 81799 - DNA, 120 bp, Homo sapiens
  misc_feature: 443 for SV(C|O) and mtDNA
acacaaactaccacctacctccctcaccaaagcccataaaaataaaaaattataacaaaccctgagaaccaaaatgaacgaaaatctgttcgcttcattcattgcccccacaatcctagg

SEQ ID NO: 81800 - DNA, 120 bp, Homo sapiens; identical to SEQ ID NO: 59698
  misc_feature: 443 for SV(C|O) and mtDNA

SEQ ID NO: 81801 - DNA, 120 bp, Homo sapiens
  misc_feature: 442 for SV(C|O) and mtDNA
ttgtgtagagttcaggggagagtgcgtcatatgttgttcctaggaagattgtagtggtgagggtgtttattataataatgtttgtgtattcggctatgaagaataaggcgaaggggcctg

SEQ ID NO: 81802 - DNA, 120 bp, Homo sapiens; identical to SEQ ID NO: 59390
  misc_feature: 442 for SV(C|O) and mtDNA

SEQ ID NO: 81803 - DNA, 120 bp, Homo sapiens
  misc_feature: 442 for SV(C|O) and mtDNA
aaacccagctacgcaaaatcttagcatactcctcaattacccacataggatgaataatagcagttctaccgtacaaccctaacataaccattcttaatttaactatttatattatcctaa

SEQ ID NO: 81804 - DNA, 120 bp, Homo sapiens; identical to SEQ ID NO: 57799
  misc_feature: 442 for SV(C|O) and mtDNA

SEQ ID NO: 81805 - DNA, 120 bp, Homo sapiens; identical to SEQ ID NO: 58582
  misc_feature: 442 for SV(C|O) and mtDNA

SEQ ID NO: 81806 - DNA, 120 bp, Homo sapiens
  misc_feature: 442 for SV(C|O) and mtDNA
cgcaacctcaacaccaccttcttcgaccccgccggaggaggagaccccattctataccaacacctattctgatttttcggtcaccctgaagtttatattcttatcctaccaggcttcgga

SEQ ID NO: 81807 - DNA, 120 bp, Homo sapiens; identical to SEQ ID NO: 62954
  misc_feature: 442 for SV(C|O) and mtDNA

SEQ ID NO: 81808 - DNA, 120 bp, Homo sapiens
  misc_feature: 442 for SV(C|O) and mtDNA
ggagtatgctaagattttgcgtagctgggtttggtttaatccacctcaactgcctgctatgatggataagattgagagagtgaggagaaggcttacgtttagtgagggagagatttggta

SEQ ID NO: 81809 - DNA, 120 bp, Homo sapiens
  misc_feature: 442 for SV(C|O) and mtDNA
accctcccttagcagggaactactcccaccctggagcctccgtagacctaaccatcttctccttacacctagcaggtgtctcctctatcttaggggccatcaacttcatcacaacaatta

SEQ ID NO: 81810 - DNA, 120 bp, Homo sapiens
  misc_feature: 442 for SV(C|O) and mtDNA
agtctaccctcccttagcagggaactactcccaccctggagcctccgtagacctaaccatcttctccttacacctagcaggtgtctcctctatcttaggggccatcaacttcatcacaac

SEQ ID NO: 81811 - DNA, 120 bp, Homo sapiens
  misc_feature: 442 for SV(C|O) and mtDNA
ctgtacccacgccttcttcaaagccatactatttatgtgctccgggtccatcatccacaaccttaacaatgaacaagatatccgaaaaataggaggactactcaaaaccatacctctcac

SEQ ID NO: 81812 - DNA, 120 bp, Homo sapiens
  misc_feature: 442 for SV(C|O) and mtDNA
gggtttggtttaatccacctcaactgcctgctatgatggataagattgagagagtgaggagaaggcttacgtttagtgagggagagatttggtatatgattgagatgggggctagttttt

SEQ ID NO: 81813 - DNA, 120 bp, Homo sapiens
  misc_feature: 442 for SV(C|O) and mtDNA
gggggatgcgggggaaatgttgttagtaatgagaaatcctgcgaataggcttccggctgtcaggcgtttaatggggtttagtagggtggggttattttcgttaatgttagtaagggtggg

SEQ ID NO: 81814 - DNA, 120 bp, Homo sapiens
  misc_feature: 442 for SV(C|O) and mtDNA
agtggagtagggctgagactggggtggggccttctatggctgaggggagtcaggggtggagacctaattgggctgatttgcctgctgctgctaggaggaggcctagtagtggggtgaggc

SEQ ID NO: 81815 - DNA, 120 bp, Homo sapiens
  misc_feature: 442 for SV(C|O) and mtDNA
gcattagcaggaatacctttcctcacaggtttctactccaaagaccacatcatcgaaaccgcaaacatatcatacacaaacgcctgagccctatctattactctcatcgctacctccctg

SEQ ID NO: 81816 - DNA, 120 bp, Homo sapiens; identical to SEQ ID NO: 58895
  misc_feature: 442 for SV(C|O) and mtDNA

SEQ ID NO: 81817 - DNA, 120 bp, Homo sapiens; identical to SEQ ID NO: 60145
  misc_feature: 442 for SV(C|O) and mtDNA

SEQ ID NO: 81818 - DNA, 120 bp, Homo sapiens
  misc_feature: 442 for SV(C|O) and mtDNA
cctagataggggattgtgcggtgtgtgatggtagggtagaatccgagtatgttggagaaataaaatgtgcatagtggggattttattttaagtttgttggttaggtagttgaggtctagg

SEQ ID NO: 81819 - DNA, 120 bp, Homo sapiens
  misc_feature: 442 for SV(C|O) and mtDNA
cccagtcctagctgctggcatcactatactactaacagaccgcaacctcaacaccaccttcttcgaccccgccggaggaggagaccccattctataccaacacctattctgatttttcgg

SEQ ID NO: 81820 - DNA, 120 bp, Homo sapiens
  misc_feature: 442 for SV(C|O) and mtDNA
agttgaagattagtccgccgtagtcggtgtactcgtaggttcagtaccattggtggccaattgatttgatggtaagggagggatcgttgacctcgtctgttatgtaaaggatgcgcaggg

SEQ ID NO: 81821 - DNA, 120 bp, Homo sapiens; identical to SEQ ID NO: 60977
  misc_feature: 442 for SV(C|O) and mtDNA

SEQ ID NO: 81822 - DNA, 120 bp, Homo sapiens; identical to SEQ ID NO: 61077
  misc_feature: 441 for SV(C|O) and mtDNA

SEQ ID NO: 81823 - DNA, 120 bp, Homo sapiens; identical to SEQ ID NO: 60978
  misc_feature: 441 for SV(C|O) and mtDNA

SEQ ID NO: 81824 - DNA, 120 bp, Homo sapiens; identical to SEQ ID NO: 58944
  misc_feature: 441 for SV(C|O) and mtDNA

SEQ ID NO: 81825 - DNA, 120 bp, Homo sapiens
  misc_feature: 441 for SV(C|O) and mtDNA
ttgagtggagtagggctgagactggggtggggccttctatggctgaggggagtcaggggtggagacctaattgggctgatttgcctgctgctgctaggaggaggcctagtagtggggtga

SEQ ID NO: 81826 - DNA, 120 bp, Homo sapiens
  misc_feature: 441 for SV(C|O) and mtDNA
gtctaccctcccttagcagggaactactcccaccctggagcctccgtagacctaaccatcttctccttacacctagcaggtgtctcctctatcttaggggccatcaacttcatcacaaca

SEQ ID NO: 81827 - DNA, 120 bp, Homo sapiens; identical to SEQ ID NO: 57273
  misc_feature: 441 for SV(C|O) and mtDNA

SEQ ID NO: 81828 - DNA, 120 bp, Homo sapiens; identical to SEQ ID NO: 60064
  misc_feature: 441 for SV(C|O) and mtDNA

SEQ ID NO: 81829 - DNA, 120 bp, Homo sapiens; identical to SEQ ID NO: 60408
  misc_feature: 441 for SV(C|O) and mtDNA

SEQ ID NO: 81830 - DNA, 120 bp, Homo sapiens
  misc_feature: 441 for SV(C|O) and mtDNA
tagacgggctcacatcaccccataaacaaataggtttggtcctagcctttctattagctcttagtaagattacacatgcaagcatccccgttccagtgagttcaccctctaaatcaccac

SEQ ID NO: 81831 - DNA, 120 bp, Homo sapiens
  misc_feature: 441 for SV(C|O) and mtDNA
gggattgttgtttggaagggggatgcgggggaaatgttgttagtaatgagaaatcctgcgaataggcttccggctgtcaggcgtttaatggggtttagtagggtggggttattttcgtta

SEQ ID NO: 81832 - DNA, 120 bp, Homo sapiens
  misc_feature: 441 for SV(C|O) and mtDNA
agcctagcattagcaggaatacctttcctcacaggtttctactccaaagaccacatcatcgaaaccgcaaacatatcatacacaaacgcctgagccctatctattactctcatcgctacc

SEQ ID NO: 81833 - DNA, 120 bp, Homo sapiens
  misc_feature: 441 for SV(C|O) and mtDNA
gagcaggaacaggttgaacagtctaccctcccttagcagggaactactcccaccctggagcctccgtagacctaaccatcttctccttacacctagcaggtgtctcctctatcttagggg

SEQ ID NO: 81834 - DNA, 120 bp, Homo sapiens
  misc_feature: 441 for SV(C|O) and mtDNA
ctttatggccctgaagtaggaaccagatgtcggatacagttcactttagctacccccaagtgttatgggcccggagcgaggagagtagcactcttgtgcgggatattgatttcacggagg

SEQ ID NO: 81835 - DNA, 120 bp, Homo sapiens; identical to SEQ ID NO: 60304
  misc_feature: 441 for SV(C|O) and mtDNA

SEQ ID NO: 81836 - DNA, 120 bp, Homo sapiens
  misc_feature: 441 for SV(C|O) and mtDNA
ccggagcaggaacaggttgaacagtctaccctcccttagcagggaactactcccaccctggagcctccgtagacctaaccatcttctccttacacctagcaggtgtctcctctatcttag

SEQ ID NO: 81837 - DNA, 120 bp, Homo sapiens; identical to SEQ ID NO: 61357
  misc_feature: 441 for SV(C|O) and mtDNA

SEQ ID NO: 81838 - DNA, 120 bp, Homo sapiens
  misc_feature: 441 for SV(C|O) and mtDNA
atatgttaaagccactttcgtagtctattttgtgtcagctggagttttttacaactcaggtgagttttagctttattggggagggggtgatctaaaacactctttacgccggcttctatt

SEQ ID NO: 81839 - DNA, 120 bp, Homo sapiens
  misc_feature: 441 for SV(C|O) and mtDNA
agataggggattgtgcggtgtgtgatggtagggtagaatccgagtatgttggagaaataaaatgtgcatagtggggattttattttaagtttgttggttaggtagttgaggtctagggct

SEQ ID NO: 81840 - DNA, 120 bp, Homo sapiens
  misc_feature: 441 for SV(C|O) and mtDNA
agagggggattgttgtttggaagggggatgcgggggaaatgttgttagtaatgagaaatcctgcgaataggcttccggctgtcaggcgtttaatggggtttagtagggtggggttatttt

SEQ ID NO: 81841 - DNA, 120 bp, Homo sapiens; identical to SEQ ID NO: 59081
  misc_feature: 440 for SV(C|O) and mtDNA

SEQ ID NO: 81842 - DNA, 120 bp, Homo sapiens; identical to SEQ ID NO: 59995
  misc_feature: 440 for SV(C|O) and mtDNA

SEQ ID NO: 81843 - DNA, 120 bp, Homo sapiens
  misc_feature: 440 for SV(C|O) and mtDNA
tgcttgatgcttgtcccttttgatcgtggtgatttagagggtgaactcactggaacggggatgcttgcatgtgtaatcttactaagagctaatagaaaggctaggaccaaacctatttgt

SEQ ID NO: 81844 - DNA, 120 bp, Homo sapiens; identical to SEQ ID NO: 60343
  misc_feature: 440 for SV(C|O) and mtDNA

SEQ ID NO: 81845 - DNA, 120 bp, Homo sapiens; identical to SEQ ID NO: 61110
  misc_feature: 440 for SV(C|O) and mtDNA

SEQ ID NO: 81846 - DNA, 120 bp, Homo sapiens; identical to SEQ ID NO: 58620
  misc_feature: 440 for SV(C|O) and mtDNA

SEQ ID NO: 81847 - DNA, 120 bp, Homo sapiens; identical to SEQ ID NO: 60349
  misc_feature: 440 for SV(C|O) and mtDNA

SEQ ID NO: 81848 - DNA, 120 bp, Homo sapiens
  misc_feature: 440 for SV(C|O) and mtDNA
cattagcaggaatacctttcctcacaggtttctactccaaagaccacatcatcgaaaccgcaaacatatcatacacaaacgcctgagccctatctattactctcatcgctacctccctga

SEQ ID NO: 81849 - DNA, 120 bp, Homo sapiens; identical to SEQ ID NO: 59714
  misc_feature: 440 for SV(C|O) and mtDNA

SEQ ID NO: 81850 - DNA, 120 bp, Homo sapiens
  misc_feature: 440 for SV(C|O) and mtDNA
aacccagctacgcaaaatcttagcatactcctcaattacccacataggatgaataatagcagttctaccgtacaaccctaacataaccattcttaatttaactatttatattatcctaac

SEQ ID NO: 81851 - DNA, 120 bp, Homo sapiens; identical to SEQ ID NO: 61120
  misc_feature: 440 for SV(C|O) and mtDNA

SEQ ID NO: 81852 - DNA, 120 bp, Homo sapiens; identical to SEQ ID NO: 58483
  misc_feature: 440 for SV(C|O) and mtDNA

SEQ ID NO: 81853 - DNA, 120 bp, Homo sapiens; identical to SEQ ID NO: 60113
  misc_feature: 440 for SV(C|O) and mtDNA

SEQ ID NO: 81854 - DNA, 120 bp, Homo sapiens; identical to SEQ ID NO: 62963
  misc_feature: 440 for SV(C|O) and mtDNA

SEQ ID NO: 81855 - DNA, 120 bp, Homo sapiens; identical to SEQ ID NO: 60679
  misc_feature: 440 for SV(C|O) and mtDNA

SEQ ID NO: 81856 - DNA, 120 bp, Homo sapiens; identical to SEQ ID NO: 59249
  misc_feature: 440 for SV(C|O) and mtDNA

SEQ ID NO: 81857 - DNA, 120 bp, Homo sapiens
  misc_feature: 439 for SV(C|O) and mtDNA
ttgatggcccctaagatagaggagacacctgctaggtgtaaggagaagatggttaggtctacggaggctccagggtgggagtagttccctgctaagggagggtagactgttcaacctgtt

SEQ ID NO: 81858 - DNA, 120 bp, Homo sapiens; identical to SEQ ID NO: 61234
  misc_feature: 439 for SV(C|O) and mtDNA

SEQ ID NO: 81859 - DNA, 120 bp, Homo sapiens; identical to SEQ ID NO: 59926
  misc_feature: 439 for SV(C|O) and mtDNA

SEQ ID NO: 81860 - DNA, 120 bp, Homo sapiens; identical to SEQ ID NO: 60454
  misc_feature: 439 for SV(C|O) and mtDNA

SEQ ID NO: 81861 - DNA, 120 bp, Homo sapiens; identical to SEQ ID NO: 62964
  misc_feature: 439 for SV(C|O) and mtDNA

SEQ ID NO: 81862 - DNA, 120 bp, Homo sapiens; identical to SEQ ID NO: 56145
  misc_feature: 439 for SV(C|O) and mtDNA

SEQ ID NO: 81863 - DNA, 120 bp, Homo sapiens; identical to SEQ ID NO: 61206
  misc_feature: 439 for SV(C|O) and mtDNA

SEQ ID NO: 81864 - DNA, 120 bp, Homo sapiens
  misc_feature: 439 for SV(C|O) and mtDNA
ggcctagataggggattgtgcggtgtgtgatggtagggtagaatccgagtatgttggagaaataaaatgtgcatagtggggattttattttaagtttgttggttaggtagttgaggtcta

SEQ ID NO: 81865 - DNA, 120 bp, Homo sapiens
  misc_feature: 439 for SV(C|O) and mtDNA
gtgcttgatgcttgtcccttttgatcgtggtgatttagagggtgaactcactggaacggggatgcttgcatgtgtaatcttactaagagctaatagaaaggctaggaccaaacctatttg

SEQ ID NO: 81866 - DNA, 120 bp, Homo sapiens
  misc_feature: 439 for SV(C|O) and mtDNA
gcgagcagtagcccaaacaatctcatatgaagtcaccctagccatcattctactatcaacattactaataagtggctcctttaacctctccacccttatcacaacacaagaacacctctg

SEQ ID NO: 81867 - DNA, 120 bp, Homo sapiens
  misc_feature: 439 for SV(C|O) and mtDNA
agcagtgattaacctttagcaataaacgaaagtttaactaagctatactaaccccagggttggtcaatttcgtgccagccaccgcggtcacacgattaacccaagtcaatagaagccggc

SEQ ID NO: 81868 - DNA, 120 bp, Homo sapiens; identical to SEQ ID NO: 60549
  misc_feature: 439 for SV(C|O) and mtDNA

SEQ ID NO: 81869 - DNA, 120 bp, Homo sapiens
  misc_feature: 439 for SV(C|O) and mtDNA
gagttttaggtagagggggattgttgtttggaagggggatgcgggggaaatgttgttagtaatgagaaatcctgcgaataggcttccggctgtcaggcgtttaatggggtttagtagggt

SEQ ID NO: 81870 - DNA, 120 bp, Homo sapiens
  misc_feature: 439 for SV(C|O) and mtDNA
gagttgaagattagtccgccgtagtcggtgtactcgtaggttcagtaccattggtggccaattgatttgatggtaagggagggatcgttgacctcgtctgttatgtaaaggatgcgcagg

SEQ ID NO: 81871 - DNA, 120 bp, Homo sapiens
  misc_feature: 439 for SV(C|O) and mtDNA
cctagcattagcaggaatacctttcctcacaggtttctactccaaagaccacatcatcgaaaccgcaaacatatcatacacaaacgcctgagccctatctattactctcatcgctacctc

SEQ ID NO: 81872 - DNA, 120 bp, Homo sapiens
  misc_feature: 439 for SV(C|O) and mtDNA
cttgagtggagtagggctgagactggggtggggccttctatggctgaggggagtcaggggtggagacctaattgggctgatttgcctgctgctgctaggaggaggcctagtagtggggtg

SEQ ID NO: 81873 - DNA, 120 bp, Homo sapiens; identical to SEQ ID NO: 60244
  misc_feature: 439 for SV(C|O) and mtDNA

SEQ ID NO: 81874 - DNA, 120 bp, Homo sapiens
  misc_feature: 439 for SV(C|O) and mtDNA
agggggattgttgtttggaagggggatgcgggggaaatgttgttagtaatgagaaatcctgcgaataggcttccggctgtcaggcgtttaatggggtttagtagggtggggttattttcg

SEQ ID NO: 81875 - DNA, 120 bp, Homo sapiens; identical to SEQ ID NO: 58224
  misc_feature: 439 for SV(C|O) and mtDNA

SEQ ID NO: 81876 - DNA, 120 bp, Homo sapiens
  misc_feature: 439 for SV(C|O) and mtDNA
agggggatgcgggggaaatgttgttagtaatgagaaatcctgcgaataggcttccggctgtcaggcgtttaatggggtttagtagggtggggttattttcgttaatgttagtaagggtgg

SEQ ID NO: 81877 - DNA, 120 bp, Homo sapiens
  misc_feature: 439 for SV(C|O) and mtDNA
cagatatgttaaagccactttcgtagtctattttgtgtcagctggagttttttacaactcaggtgagttttagctttattggggagggggtgatctaaaacactctttacgccggcttct

SEQ ID NO: 81878 - DNA, 120 bp, Homo sapiens; identical to SEQ ID NO: 61271
  misc_feature: 438 for SV(C|O) and mtDNA

SEQ ID NO: 81879 - DNA, 120 bp, Homo sapiens; identical to SEQ ID NO: 59998
  misc_feature: 438 for SV(C|O) and mtDNA

SEQ ID NO: 81880 - DNA, 120 bp, Homo sapiens; identical to SEQ ID NO: 60125
  misc_feature: 438 for SV(C|O) and mtDNA

SEQ ID NO: 81881 - DNA, 120 bp, Homo sapiens; identical to SEQ ID NO: 58477
  misc_feature: 438 for SV(C|O) and mtDNA

SEQ ID NO: 81882 - DNA, 120 bp, Homo sapiens
  misc_feature: 438 for SV(C|O) and mtDNA
tcagatatgttaaagccactttcgtagtctattttgtgtcagctggagttttttacaactcaggtgagttttagctttattggggagggggtgatctaaaacactctttacgccggcttc

SEQ ID NO: 81883 - DNA, 120 bp, Homo sapiens; identical to SEQ ID NO: 61880
  misc_feature: 438 for SV(C|O) and mtDNA

SEQ ID NO: 81884 - DNA, 120 bp, Homo sapiens
  misc_feature: 438 for SV(C|O) and mtDNA
atgttaaagccactttcgtagtctattttgtgtcagctggagttttttacaactcaggtgagttttagctttattggggagggggtgatctaaaacactctttacgccggcttctattga

SEQ ID NO: 81885 - DNA, 120 bp, Homo sapiens
  misc_feature: 438 for SV(C|O) and mtDNA
tagcattagcaggaatacctttcctcacaggtttctactccaaagaccacatcatcgaaaccgcaaacatatcatacacaaacgcctgagccctatctattactctcatcgctacctccc

SEQ ID NO: 81886 - DNA, 120 bp, Homo sapiens; identical to SEQ ID NO: 61333
  misc_feature: 438 for SV(C|O) and mtDNA

SEQ ID NO: 81887 - DNA, 120 bp, Homo sapiens
  misc_feature: 438 for SV(C|O) and mtDNA
cgtgcttgatgcttgtcccttttgatcgtggtgatttagagggtgaactcactggaacggggatgcttgcatgtgtaatcttactaagagctaatagaaaggctaggaccaaacctattt

SEQ ID NO: 81888 - DNA, 120 bp, Homo sapiens; identical to SEQ ID NO: 59248
  misc_feature: 438 for SV(C|O) and mtDNA

SEQ ID NO: 81889 - DNA, 120 bp, Homo sapiens
  misc_feature: 437 for SV(C|O) and mtDNA
tttcatcctcgccttagcatgatttatcctacactccaactcatgagacccacaacaaatagcccttctaaacgctaatccaagcctcaccccactactaggcctcctcctagcagcagc

SEQ ID NO: 81890 - DNA, 120 bp, Homo sapiens; identical to SEQ ID NO: 59753
  misc_feature: 437 for SV(C|O) and mtDNA

SEQ ID NO: 81891 - DNA, 120 bp, Homo sapiens
  misc_feature: 437 for SV(C|O) and mtDNA
agtcctacttctcctatctctcccagtcctagctgctggcatcactatactactaacagaccgcaacctcaacaccaccttcttcgaccccgccggaggaggagaccccattctatacca

SEQ ID NO: 81892 - DNA, 120 bp, Homo sapiens
  misc_feature: 437 for SV(C|O) and mtDNA
caggaacaggttgaacagtctaccctcccttagcagggaactactcccaccctggagcctccgtagacctaaccatcttctccttacacctagcaggtgtctcctctatcttaggggcca

SEQ ID NO: 81893 - DNA, 120 bp, Homo sapiens
  misc_feature: 437 for SV(C|O) and mtDNA
tgagtggagtagggctgagactggggtggggccttctatggctgaggggagtcaggggtggagacctaattgggctgatttgcctgctgctgctaggaggaggcctagtagtggggtgag

SEQ ID NO: 81894 - DNA, 120 bp, Homo sapiens
  misc_feature: 437 for SV(C|O) and mtDNA
ggctttatggccctgaagtaggaaccagatgtcggatacagttcactttagctacccccaagtgttatgggcccggagcgaggagagtagcactcttgtgcgggatattgatttcacgga

SEQ ID NO: 81895 - DNA, 120 bp, Homo sapiens
  misc_feature: 437 for SV(C|O) and mtDNA
tatggccctgaagtaggaaccagatgtcggatacagttcactttagctacccccaagtgttatgggcccggagcgaggagagtagcactcttgtgcgggatattgatttcacggaggatg

SEQ ID NO: 81896 - DNA, 120 bp, Homo sapiens
  misc_feature: 437 for SV(C|O) and mtDNA
taccctcccttagcagggaactactcccaccctggagcctccgtagacctaaccatcttctccttacacctagcaggtgtctcctctatcttaggggccatcaacttcatcacaacaatt

SEQ ID NO: 81897 - DNA, 120 bp, Homo sapiens
  misc_feature: 437 for SV(C|O) and mtDNA
gtggagtagggctgagactggggtggggccttctatggctgaggggagtcaggggtggagacctaattgggctgatttgcctgctgctgctaggaggaggcctagtagtggggtgaggct

SEQ ID NO: 81898 - DNA, 120 bp, Homo sapiens
  misc_feature: 437 for SV(C|O) and mtDNA
gtacccacgccttcttcaaagccatactatttatgtgctccgggtccatcatccacaaccttaacaatgaacaagatatccgaaaaataggaggactactcaaaaccatacctctcactt

SEQ ID NO: 81899 - DNA, 120 bp, Homo sapiens; identical to SEQ ID NO: 60966
  misc_feature: 437 for SV(C|O) and mtDNA

SEQ ID NO: 81900 - DNA, 120 bp, Homo sapiens
  misc_feature: 437 for SV(C|O) and mtDNA
cagtcctacttctcctatctctcccagtcctagctgctggcatcactatactactaacagaccgcaacctcaacaccaccttcttcgaccccgccggaggaggagaccccattctatacc

SEQ ID NO: 81901 - DNA, 120 bp, Homo sapiens; identical to SEQ ID NO: 52978
  misc_feature: 437 for SV(C|O) and mtDNA

SEQ ID NO: 81902 - DNA, 120 bp, Homo sapiens; identical to SEQ ID NO: 61926
  misc_feature: 437 for SV(C|O) and mtDNA

SEQ ID NO: 81903 - DNA, 120 bp, Homo sapiens
  misc_feature: 437 for SV(C|O) and mtDNA
gcctagcattagcaggaatacctttcctcacaggtttctactccaaagaccacatcatcgaaaccgcaaacatatcatacacaaacgcctgagccctatctattactctcatcgctacct

SEQ ID NO: 81904 - DNA, 120 bp, Homo sapiens
  misc_feature: 437 for SV(C|O) and mtDNA
agcaggaacaggttgaacagtctaccctcccttagcagggaactactcccaccctggagcctccgtagacctaaccatcttctccttacacctagcaggtgtctcctctatcttaggggc

SEQ ID NO: 81905 - DNA, 120 bp, Homo sapiens
  misc_feature: 437 for SV(C|O) and mtDNA
acagcagtgattaacctttagcaataaacgaaagtttaactaagctatactaaccccagggttggtcaatttcgtgccagccaccgcggtcacacgattaacccaagtcaatagaagccg

SEQ ID NO: 81906 - DNA, 120 bp, Homo sapiens; identical to SEQ ID NO: 60306
  misc_feature: 437 for SV(C|O) and mtDNA

SEQ ID NO: 81907 - DNA, 120 bp, Homo sapiens
  misc_feature: 437 for SV(C|O) and mtDNA
aagggggatgcgggggaaatgttgttagtaatgagaaatcctgcgaataggcttccggctgtcaggcgtttaatggggtttagtagggtggggttattttcgttaatgttagtaagggtg

SEQ ID NO: 81908 - DNA, 120 bp, Homo sapiens
  misc_feature: 437 for SV(C|O) and mtDNA
caacctcaacaccaccttcttcgaccccgccggaggaggagaccccattctataccaacacctattctgatttttcggtcaccctgaagtttatattcttatcctaccaggcttcggaat

SEQ ID NO: 81909 - DNA, 120 bp, Homo sapiens; identical to SEQ ID NO: 61621
  misc_feature: 436 for SV(C|O) and mtDNA

SEQ ID NO: 81910 - DNA, 120 bp, Homo sapiens
  misc_feature: 436 for SV(C|O) and mtDNA
ttatggccctgaagtaggaaccagatgtcggatacagttcactttagctacccccaagtgttatgggcccggagcgaggagagtagcactcttgtgcgggatattgatttcacggaggat

SEQ ID NO: 81911 - DNA, 120 bp, Homo sapiens
  misc_feature: 436 for SV(C|O) and mtDNA
tgtacccacgccttcttcaaagccatactatttatgtgctccgggtccatcatccacaaccttaacaatgaacaagatatccgaaaaataggaggactactcaaaaccatacctctcact

SEQ ID NO: 81912 - DNA, 120 bp, Homo sapiens; identical to SEQ ID NO: 59816
  misc_feature: 436 for SV(C|O) and mtDNA

SEQ ID NO: 81913 - DNA, 120 bp, Homo sapiens; identical to SEQ ID NO: 61325
  misc_feature: 436 for SV(C|O) and mtDNA

SEQ ID NO: 81914 - DNA, 120 bp, Homo sapiens
  misc_feature: 436 for SV(C|O) and mtDNA
taaactttcgtttattgctaaaggttaatcactgctgtttcccgtgggggtgtggctaggctaagcgttttgagctgcattgctgcgtgcttgatgcttgtcccttttgatcgtggtgat

SEQ ID NO: 81915 - DNA, 120 bp, Homo sapiens
  misc_feature: 436 for SV(C|O) and mtDNA
gcaggaacaggttgaacagtctaccctcccttagcagggaactactcccaccctggagcctccgtagacctaaccatcttctccttacacctagcaggtgtctcctctatcttaggggcc

SEQ ID NO: 81916 - DNA, 120 bp, Homo sapiens; identical to SEQ ID NO: 60492
  misc_feature: 436 for SV(C|O) and mtDNA

SEQ ID NO: 81917 - DNA, 120 bp, Homo sapiens
  misc_feature: 436 for SV(C|O) and mtDNA
gaagggggatgcgggggaaatgttgttagtaatgagaaatcctgcgaataggcttccggctgtcaggcgtttaatggggtttagtagggtggggttattttcgttaatgttagtaagggt

SEQ ID NO: 81918 - DNA, 120 bp, Homo sapiens; identical to SEQ ID NO: 61914
  misc_feature: 436 for SV(C|O) and mtDNA

SEQ ID NO: 81919 - DNA, 120 bp, Homo sapiens
  misc_feature: 436 for SV(C|O) and mtDNA
agttttaggtagagggggattgttgtttggaagggggatgcgggggaaatgttgttagtaatgagaaatcctgcgaataggcttccggctgtcaggcgtttaatggggtttagtagggtg

SEQ ID NO: 81920 - DNA, 120 bp, Homo sapiens
  misc_feature: 435 for SV(C|O) and mtDNA
ttagacgggctcacatcaccccataaacaaataggtttggtcctagcctttctattagctcttagtaagattacacatgcaagcatccccgttccagtgagttcaccctctaaatcacca

SEQ ID NO: 81921 - DNA, 120 bp, Homo sapiens
  misc_feature: 435 for SV(C|O) and mtDNA
acccacgccttcttcaaagccatactatttatgtgctccgggtccatcatccacaaccttaacaatgaacaagatatccgaaaaataggaggactactcaaaaccatacctctcacttca

SEQ ID NO: 81922 - DNA, 120 bp, Homo sapiens; identical to SEQ ID NO: 61648
  misc_feature: 435 for SV(C|O) and mtDNA

SEQ ID NO: 81923 - DNA, 120 bp, Homo sapiens; identical to SEQ ID NO: 58000
  misc_feature: 435 for SV(C|O) and mtDNA

SEQ ID NO: 81924 - DNA, 120 bp, Homo sapiens
  misc_feature: 435 for SV(C|O) and mtDNA
gttgatggcccctaagatagaggagacacctgctaggtgtaaggagaagatggttaggtctacggaggctccagggtgggagtagttccctgctaagggagggtagactgttcaacctgt

SEQ ID NO: 81925 - DNA, 120 bp, Homo sapiens; identical to SEQ ID NO: 57842
  misc_feature: 435 for SV(C|O) and mtDNA

SEQ ID NO: 81926 - DNA, 120 bp, Homo sapiens
  misc_feature: 435 for SV(C|O) and mtDNA
gctttatggccctgaagtaggaaccagatgtcggatacagttcactttagctacccccaagtgttatgggcccggagcgaggagagtagcactcttgtgcgggatattgatttcacggag

SEQ ID NO: 81927 - DNA, 120 bp, Homo sapiens; identical to SEQ ID NO: 52825
  misc_feature: 435 for SV(C|O) and mtDNA

SEQ ID NO: 81928 - DNA, 120 bp, Homo sapiens
  misc_feature: 435 for SV(C|O) and mtDNA
attggcagcctagcattagcaggaatacctttcctcacaggtttctactccaaagaccacatcatcgaaaccgcaaacatatcatacacaaacgcctgagccctatctattactctcatc

SEQ ID NO: 81929 - DNA, 120 bp, Homo sapiens
  misc_feature: 435 for SV(C|O) and mtDNA
gagtagggctgagactggggtggggccttctatggctgaggggagtcaggggtggagacctaattgggctgatttgcctgctgctgctaggaggaggcctagtagtggggtgaggcttgg

SEQ ID NO: 81930 - DNA, 120 bp, Homo sapiens; identical to SEQ ID NO: 61336
  misc_feature: 435 for SV(C|O) and mtDNA

SEQ ID NO: 81931 - DNA, 120 bp, Homo sapiens
  misc_feature: 435 for SV(C|O) and mtDNA
agttgatggcccctaagatagaggagacacctgctaggtgtaaggagaagatggttaggtctacggaggctccagggtgggagtagttccctgctaagggagggtagactgttcaacctg

SEQ ID NO: 81932 - DNA, 120 bp, Homo sapiens
  misc_feature: 434 for SV(C|O) and mtDNA
tttaagttgagtagtaggaatgcggtagtagttaggataatataaatagttaaattaagaatggttatgttagggttgtacggtagaactgctattattcatcctatgtgggtaattgag

SEQ ID NO: 81933 - DNA, 120 bp, Homo sapiens
  misc_feature: 434 for SV(C|O) and mtDNA
ttgatgcttgtcccttttgatcgtggtgatttagagggtgaactcactggaacggggatgcttgcatgtgtaatcttactaagagctaatagaaaggctaggaccaaacctatttgttta

SEQ ID NO: 81934 - DNA, 120 bp, Homo sapiens
  misc_feature: 434 for SV(C|O) and mtDNA
tatattgataattgttgtgatgaagttgatggcccctaagatagaggagacacctgctaggtgtaaggagaagatggttaggtctacggaggctccagggtgggagtagttccctgctaa

SEQ ID NO: 81935 - DNA, 120 bp, Homo sapiens
  misc_feature: 434 for SV(C|O) and mtDNA
tcctacttctcctatctctcccagtcctagctgctggcatcactatactactaacagaccgcaacctcaacaccaccttcttcgaccccgccggaggaggagaccccattctataccaac

SEQ ID NO: 81936 - DNA, 120 bp, Homo sapiens; identical to SEQ ID NO: 59760
  misc_feature: 434 for SV(C|O) and mtDNA

SEQ ID NO: 81937 - DNA, 120 bp, Homo sapiens; identical to SEQ ID NO: 59525
  misc_feature: 434 for SV(C|O) and mtDNA

SEQ ID NO: 81938 - DNA, 120 bp, Homo sapiens
  misc_feature: 434 for SV(C|O) and mtDNA
agcattagcaggaatacctttcctcacaggtttctactccaaagaccacatcatcgaaaccgcaaacatatcatacacaaacgcctgagccctatctattactctcatcgctacctccct

SEQ ID NO: 81939 - DNA, 120 bp, Homo sapiens; identical to SEQ ID NO: 59227
  misc_feature: 433 for SV(C|O) and mtDNA

SEQ ID NO: 81940 - DNA, 120 bp, Homo sapiens
  misc_feature: 433 for SV(C|O) and mtDNA
gcaacctcaacaccaccttcttcgaccccgccggaggaggagaccccattctataccaacacctattctgatttttcggtcaccctgaagtttatattcttatcctaccaggcttcggaa

SEQ ID NO: 81941 - DNA, 120 bp, Homo sapiens
  misc_feature: 433 for SV(C|O) and mtDNA
tgtgtagagttcaggggagagtgcgtcatatgttgttcctaggaagattgtagtggtgagggtgtttattataataatgtttgtgtattcggctatgaagaataaggcgaaggggcctgc

SEQ ID NO: 81942 - DNA, 120 bp, Homo sapiens
  misc_feature: 433 for SV(C|O) and mtDNA
tgggtttggtttaatccacctcaactgcctgctatgatggataagattgagagagtgaggagaaggcttacgtttagtgagggagagatttggtatatgattgagatgggggctagtttt

SEQ ID NO: 81943 - DNA, 120 bp, Homo sapiens; identical to SEQ ID NO: 60941
  misc_feature: 433 for SV(C|O) and mtDNA

SEQ ID NO: 81944 - DNA, 120 bp, Homo sapiens; identical to SEQ ID NO: 58052
  misc_feature: 433 for SV(C|O) and mtDNA

SEQ ID NO: 81945 - DNA, 120 bp, Homo sapiens; identical to SEQ ID NO: 62180
  misc_feature: 433 for SV(C|O) and mtDNA

SEQ ID NO: 81946 - DNA, 120 bp, Homo sapiens
  misc_feature: 433 for SV(C|O) and mtDNA
gtttggaagggggatgcgggggaaatgttgttagtaatgagaaatcctgcgaataggcttccggctgtcaggcgtttaatggggtttagtagggtggggttattttcgttaatgttagta

SEQ ID NO: 81947 - DNA, 120 bp, Homo sapiens
  misc_feature: 433 for SV(C|O) and mtDNA
gttttaggtagagggggattgttgtttggaagggggatgcgggggaaatgttgttagtaatgagaaatcctgcgaataggcttccggctgtcaggcgtttaatggggtttagtagggtgg

SEQ ID NO: 81948 - DNA, 120 bp, Homo sapiens; identical to SEQ ID NO: 60898
  misc_feature: 433 for SV(C|O) and mtDNA

SEQ ID NO: 81949 - DNA, 120 bp, Homo sapiens; identical to SEQ ID NO: 59957
  misc_feature: 433 for SV(C|O) and mtDNA

SEQ ID NO: 81950 - DNA, 120 bp, Homo sapiens; identical to SEQ ID NO: 61962
  misc_feature: 433 for SV(C|O) and mtDNA

SEQ ID NO: 81951 - DNA, 120 bp, Homo sapiens
  misc_feature: 433 for SV(C|O) and mtDNA
ggaagggggatgcgggggaaatgttgttagtaatgagaaatcctgcgaataggcttccggctgtcaggcgtttaatggggtttagtagggtggggttattttcgttaatgttagtaaggg

SEQ ID NO: 81952 - DNA, 120 bp, Homo sapiens; identical to SEQ ID NO: 61264
  misc_feature: 433 for SV(C|O) and mtDNA

SEQ ID NO: 81953 - DNA, 120 bp, Homo sapiens; identical to SEQ ID NO: 53024
  misc_feature: 433 for SV(C|O) and mtDNA

SEQ ID NO: 81954 - DNA, 120 bp, Homo sapiens; identical to SEQ ID NO: 60554
  misc_feature: 433 for SV(C|O) and mtDNA

SEQ ID NO: 81955 - DNA, 120 bp, Homo sapiens
  misc_feature: 433 for SV(C|O) and mtDNA
atgcttgtcccttttgatcgtggtgatttagagggtgaactcactggaacggggatgcttgcatgtgtaatcttactaagagctaatagaaaggctaggaccaaacctatttgtttatgg

SEQ ID NO: 81956 - DNA, 120 bp, Homo sapiens; identical to SEQ ID NO: 61647
  misc_feature: 433 for SV(C|O) and mtDNA

SEQ ID NO: 81957 - DNA, 120 bp, Homo sapiens; identical to SEQ ID NO: 58705
  misc_feature: 432 for SV(C|O) and mtDNA

SEQ ID NO: 81958 - DNA, 120 bp, Homo sapiens
  misc_feature: 432 for SV(C|O) and mtDNA
tgcttgtcccttttgatcgtggtgatttagagggtgaactcactggaacggggatgcttgcatgtgtaatcttactaagagctaatagaaaggctaggaccaaacctatttgtttatggg

SEQ ID NO: 81959 - DNA, 120 bp, Homo sapiens; identical to SEQ ID NO: 59576
  misc_feature: 432 for SV(C|O) and mtDNA

SEQ ID NO: 81960 - DNA, 120 bp, Homo sapiens; identical to SEQ ID NO: 58412
  misc_feature: 432 for SV(C|O) and mtDNA

SEQ ID NO: 81961 - DNA, 120 bp, Homo sapiens; identical to SEQ ID NO: 60756
  misc_feature: 432 for SV(C|O) and mtDNA

SEQ ID NO: 81962 - DNA, 120 bp, Homo sapiens
  misc_feature: 432 for SV(C|O) and mtDNA
ctacttctcctatctctcccagtcctagctgctggcatcactatactactaacagaccgcaacctcaacaccaccttcttcgaccccgccggaggaggagaccccattctataccaacac

SEQ ID NO: 81963 - DNA, 120 bp, Homo sapiens; identical to SEQ ID NO: 60574
  misc_feature: 432 for SV(C|O) and mtDNA

SEQ ID NO: 81964 - DNA, 120 bp, Homo sapiens
  misc_feature: 432 for SV(C|O) and mtDNA
ggtttggtttaatccacctcaactgcctgctatgatggataagattgagagagtgaggagaaggcttacgtttagtgagggagagatttggtatatgattgagatgggggctagtttttg

SEQ ID NO: 81965 - DNA, 120 bp, Homo sapiens
  misc_feature: 432 for SV(C|O) and mtDNA
ggtagagggggattgttgtttggaagggggatgcgggggaaatgttgttagtaatgagaaatcctgcgaataggcttccggctgtcaggcgtttaatggggtttagtagggtggggttat

SEQ ID NO: 81966 - DNA, 120 bp, Homo sapiens; identical to SEQ ID NO: 61532
  misc_feature: 432 for SV(C|O) and mtDNA

SEQ ID NO: 81967 - DNA, 120 bp, Homo sapiens
  misc_feature: 432 for SV(C|O) and mtDNA
ctatttgtttatggggtgatgtgagcccgtctaaacattttcagtgtattgctttgaggaggtaagctacataaactgtggggggtgtctttggggtttggttggttcggggtatggggt

SEQ ID NO: 81968 - DNA, 120 bp, Homo sapiens
  misc_feature: 432 for SV(C|O) and mtDNA
caacctccctcaccattggcagcctagcattagcaggaatacctttcctcacaggtttctactccaaagaccacatcatcgaaaccgcaaacatatcatacacaaacgcctgagccctat

SEQ ID NO: 81969 - DNA, 120 bp, Homo sapiens
  misc_feature: 432 for SV(C|O) and mtDNA
acccagctacgcaaaatcttagcatactcctcaattacccacataggatgaataatagcagttctaccgtacaaccctaacataaccattcttaatttaactatttatattatcctaact

SEQ ID NO: 81970 - DNA, 120 bp, Homo sapiens
  misc_feature: 432 for SV(C|O) and mtDNA
aggcacccctctgacatccggcctgcttcttctcacatgacaaaaactagcccccatctcaatcatataccaaatctctccctcactaaacgtaagccttctcctcactctctcaatctt

SEQ ID NO: 81971 - DNA, 120 bp, Homo sapiens
  misc_feature: 431 for SV(C|O) and mtDNA
tttagacgggctcacatcaccccataaacaaataggtttggtcctagcctttctattagctcttagtaagattacacatgcaagcatccccgttccagtgagttcaccctctaaatcacc

SEQ ID NO: 81972 - DNA, 120 bp, Homo sapiens
  misc_feature: 431 for SV(C|O) and mtDNA
tctaccctcccttagcagggaactactcccaccctggagcctccgtagacctaaccatcttctccttacacctagcaggtgtctcctctatcttaggggccatcaacttcatcacaacaa

SEQ ID NO: 81973 - DNA, 120 bp, Homo sapiens
  misc_feature: 431 for SV(C|O) and mtDNA
ttggcagcctagcattagcaggaatacctttcctcacaggtttctactccaaagaccacatcatcgaaaccgcaaacatatcatacacaaacgcctgagccctatctattactctcatcg

SEQ ID NO: 81974 - DNA, 120 bp, Homo sapiens; identical to SEQ ID NO: 61344
  misc_feature: 431 for SV(C|O) and mtDNA

SEQ ID NO: 81975 - DNA, 120 bp, Homo sapiens
  misc_feature: 431 for SV(C|O) and mtDNA
aaccccaccctactaaaccccattaaacgcctgacagccggaagcctattcgcaggatttctcattactaacaacatttcccccgcatcccccttccaaacaacaatccccctctaccta

SEQ ID NO: 81976 - DNA, 120 bp, Homo sapiens
  misc_feature: 431 for SV(C|O) and mtDNA
tagagggggattgttgtttggaagggggatgcgggggaaatgttgttagtaatgagaaatcctgcgaataggcttccggctgtcaggcgtttaatggggtttagtagggtggggttattt

SEQ ID NO: 81977 - DNA, 120 bp, Homo sapiens
  misc_feature: 431 for SV(C|O) and mtDNA
taaccccaccctactaaaccccattaaacgcctgacagccggaagcctattcgcaggatttctcattactaacaacatttcccccgcatcccccttccaaacaacaatccccctctacct

SEQ ID NO: 81978 - DNA, 120 bp, Homo sapiens
  misc_feature: 431 for SV(C|O) and mtDNA
gtttagacgggctcacatcaccccataaacaaataggtttggtcctagcctttctattagctcttagtaagattacacatgcaagcatccccgttccagtgagttcaccctctaaatcac

SEQ ID NO: 81979 - DNA, 120 bp, Homo sapiens
  misc_feature: 431 for SV(C|O) and mtDNA
gttaaactttcgtttattgctaaaggttaatcactgctgtttcccgtgggggtgtggctaggctaagcgttttgagctgcattgctgcgtgcttgatgcttgtcccttttgatcgtggtg

SEQ ID NO: 81980 - DNA, 120 bp, Homo sapiens
  misc_feature: 431 for SV(C|O) and mtDNA
cagcctagcattagcaggaatacctttcctcacaggtttctactccaaagaccacatcatcgaaaccgcaaacatatcatacacaaacgcctgagccctatctattactctcatcgctac

SEQ ID NO: 81981 - DNA, 120 bp, Homo sapiens
  misc_feature: 431 for SV(C|O) and mtDNA
cactgcgagcagtagcccaaacaatctcatatgaagtcaccctagccatcattctactatcaacattactaataagtggctcctttaacctctccacccttatcacaacacaagaacacc

SEQ ID NO: 81982 - DNA, 120 bp, Homo sapiens
  misc_feature: 431 for SV(C|O) and mtDNA
acaaactaccacctacctccctcaccaaagcccataaaaataaaaaattataacaaaccctgagaaccaaaatgaacgaaaatctgttcgcttcattcattgcccccacaatcctaggcc

SEQ ID NO: 81983 - DNA, 120 bp, Homo sapiens
  misc_feature: 431 for SV(C|O) and mtDNA
cttgatgcttgtcccttttgatcgtggtgatttagagggtgaactcactggaacggggatgcttgcatgtgtaatcttactaagagctaatagaaaggctaggaccaaacctatttgttt

SEQ ID NO: 81984 - DNA, 120 bp, Homo sapiens
  misc_feature: 431 for SV(C|O) and mtDNA
cagcagtgattaacctttagcaataaacgaaagtttaactaagctatactaaccccagggttggtcaatttcgtgccagccaccgcggtcacacgattaacccaagtcaatagaagccgg

SEQ ID NO: 81985 - DNA, 120 bp, Homo sapiens; identical to SEQ ID NO: 59972
  misc_feature: 431 for SV(C|O) and mtDNA

SEQ ID NO: 81986 - DNA, 120 bp, Homo sapiens
  misc_feature: 431 for SV(C|O) and mtDNA
ataaaaaattataacaaaccctgagaaccaaaatgaacgaaaatctgttcgcttcattcattgcccccacaatcctaggcctacccgccgcagtactgatcattctatttccccctctat

SEQ ID NO: 81987 - DNA, 120 bp, Homo sapiens; identical to SEQ ID NO: 58675
  misc_feature: 430 for SV(C|O) and mtDNA

SEQ ID NO: 81988 - DNA, 120 bp, Homo sapiens
  misc_feature: 430 for SV(C|O) and mtDNA
tttaggtagagggggattgttgtttggaagggggatgcgggggaaatgttgttagtaatgagaaatcctgcgaataggcttccggctgtcaggcgtttaatggggtttagtagggtgggg

SEQ ID NO: 81989 - DNA, 120 bp, Homo sapiens
  misc_feature: 430 for SV(C|O) and mtDNA
ttaggtagagggggattgttgtttggaagggggatgcgggggaaatgttgttagtaatgagaaatcctgcgaataggcttccggctgtcaggcgtttaatggggtttagtagggtggggt

SEQ ID NO: 81990 - DNA, 120 bp, Homo sapiens
  misc_feature: 430 for SV(C|O) and mtDNA
ggattgttgtttggaagggggatgcgggggaaatgttgttagtaatgagaaatcctgcgaataggcttccggctgtcaggcgtttaatggggtttagtagggtggggttattttcgttaa

SEQ ID NO: 81991 - DNA, 120 bp, Homo sapiens
  misc_feature: 430 for SV(C|O) and mtDNA
ttaaactttcgtttattgctaaaggttaatcactgctgtttcccgtgggggtgtggctaggctaagcgttttgagctgcattgctgcgtgcttgatgcttgtcccttttgatcgtggtga

SEQ ID NO: 81992 - DNA, 120 bp, Homo sapiens; identical to SEQ ID NO: 61849
  misc_feature: 430 for SV(C|O) and mtDNA

SEQ ID NO: 81993 - DNA, 120 bp, Homo sapiens
  misc_feature: 430 for SV(C|O) and mtDNA
taagttgagtagtaggaatgcggtagtagttaggataatataaatagttaaattaagaatggttatgttagggttgtacggtagaactgctattattcatcctatgtgggtaattgagga

SEQ ID NO: 81994 - DNA, 120 bp, Homo sapiens
  misc_feature: 430 for SV(C|O) and mtDNA
tacccacgccttcttcaaagccatactatttatgtgctccgggtccatcatccacaaccttaacaatgaacaagatatccgaaaaataggaggactactcaaaaccatacctctcacttc

SEQ ID NO: 81995 - DNA, 120 bp, Homo sapiens
  misc_feature: 430 for SV(C|O) and mtDNA
gtagagggggattgttgtttggaagggggatgcgggggaaatgttgttagtaatgagaaatcctgcgaataggcttccggctgtcaggcgtttaatggggtttagtagggtggggttatt

SEQ ID NO: 81996 - DNA, 120 bp, Homo sapiens; identical to SEQ ID NO: 58115
  misc_feature: 430 for SV(C|O) and mtDNA

SEQ ID NO: 81997 - DNA, 120 bp, Homo sapiens
  misc_feature: 430 for SV(C|O) and mtDNA
ggagagtccgaactagtctcaggcttcaacatcgaatacgccgcaggccccttcgccttattcttcatagccgaatacacaaacattattataataaacaccctcaccactacaatcttc

SEQ ID NO: 81998 - DNA, 120 bp, Homo sapiens
  misc_feature: 430 for SV(C|O) and mtDNA
gcttgatgcttgtcccttttgatcgtggtgatttagagggtgaactcactggaacggggatgcttgcatgtgtaatcttactaagagctaatagaaaggctaggaccaaacctatttgtt

SEQ ID NO: 81999 - DNA, 120 bp, Homo sapiens; identical to SEQ ID NO: 61583
  misc_feature: 430 for SV(C|O) and mtDNA

SEQ ID NO: 82000 - DNA, 120 bp, Homo sapiens; identical to SEQ ID NO: 58602
  misc_feature: 430 for SV(C|O) and mtDNA

SEQ ID NO: 82001 - DNA, 120 bp, Homo sapiens
  misc_feature: 429 for SV(C|O) and mtDNA
cctacttctcctatctctcccagtcctagctgctggcatcactatactactaacagaccgcaacctcaacaccaccttcttcgaccccgccggaggaggagaccccattctataccaaca

SEQ ID NO: 82002 - DNA, 120 bp, Homo sapiens
  misc_feature: 429 for SV(C|O) and mtDNA
tctattgacttgggttaatcgtgtgaccgcggtggctggcacgaaattgaccaaccctggggttagtatagcttagttaaactttcgtttattgctaaaggttaatcactgctgtttccc

SEQ ID NO: 82003 - DNA, 120 bp, Homo sapiens
  misc_feature: 429 for SV(C|O) and mtDNA
aataaaaaattataacaaaccctgagaaccaaaatgaacgaaaatctgttcgcttcattcattgcccccacaatcctaggcctacccgccgcagtactgatcattctatttccccctcta

SEQ ID NO: 82004 - DNA, 120 bp, Homo sapiens; identical to SEQ ID NO: 60967
  misc_feature: 429 for SV(C|O) and mtDNA

SEQ ID NO: 82005 - DNA, 120 bp, Homo sapiens
  misc_feature: 429 for SV(C|O) and mtDNA
aagttgagtagtaggaatgcggtagtagttaggataatataaatagttaaattaagaatggttatgttagggttgtacggtagaactgctattattcatcctatgtgggtaattgaggag

SEQ ID NO: 82006 - DNA, 120 bp, Homo sapiens; identical to SEQ ID NO: 61827
  misc_feature: 429 for SV(C|O) and mtDNA

SEQ ID NO: 82007 - DNA, 120 bp, Homo sapiens; identical to SEQ ID NO: 60081
  misc_feature: 429 for SV(C|O) and mtDNA

SEQ ID NO: 82008 - DNA, 120 bp, Homo sapiens; identical to SEQ ID NO: 60099
  misc_feature: 429 for SV(C|O) and mtDNA

SEQ ID NO: 82009 - DNA, 120 bp, Homo sapiens; identical to SEQ ID NO: 57756
  misc_feature: 429 for SV(C|O) and mtDNA

SEQ ID NO: 82010 - DNA, 120 bp, Homo sapiens
  misc_feature: 428 for SV(C|O) and mtDNA
gtcctacttctcctatctctcccagtcctagctgctggcatcactatactactaacagaccgcaacctcaacaccaccttcttcgaccccgccggaggaggagaccccattctataccaa

SEQ ID NO: 82011 - DNA, 120 bp, Homo sapiens
  misc_feature: 428 for SV(C|O) and mtDNA
ttctattgacttgggttaatcgtgtgaccgcggtggctggcacgaaattgaccaaccctggggttagtatagcttagttaaactttcgtttattgctaaaggttaatcactgctgtttcc

SEQ ID NO: 82012 - DNA, 120 bp, Homo sapiens
  misc_feature: 428 for SV(C|O) and mtDNA
tggccctgaagtaggaaccagatgtcggatacagttcactttagctacccccaagtgttatgggcccggagcgaggagagtagcactcttgtgcgggatattgatttcacggaggatggt

SEQ ID NO: 82013 - DNA, 120 bp, Homo sapiens; identical to SEQ ID NO: 59425
  misc_feature: 428 for SV(C|O) and mtDNA

SEQ ID NO: 82014 - DNA, 120 bp, Homo sapiens
  misc_feature: 428 for SV(C|O) and mtDNA
tcccagtcctagctgctggcatcactatactactaacagaccgcaacctcaacaccaccttcttcgaccccgccggaggaggagaccccattctataccaacacctattctgatttttcg

SEQ ID NO: 82015 - DNA, 120 bp, Homo sapiens; identical to SEQ ID NO: 59784
  misc_feature: 428 for SV(C|O) and mtDNA

SEQ ID NO: 82016 - DNA, 120 bp, Homo sapiens; identical to SEQ ID NO: 59582
  misc_feature: 428 for SV(C|O) and mtDNA

SEQ ID NO: 82017 - DNA, 120 bp, Homo sapiens
  misc_feature: 428 for SV(C|O) and mtDNA
ggccctgaagtaggaaccagatgtcggatacagttcactttagctacccccaagtgttatgggcccggagcgaggagagtagcactcttgtgcgggatattgatttcacggaggatggtg

SEQ ID NO: 82018 - DNA, 120 bp, Homo sapiens
  misc_feature: 428 for SV(C|O) and mtDNA
gccctgaagtaggaaccagatgtcggatacagttcactttagctacccccaagtgttatgggcccggagcgaggagagtagcactcttgtgcgggatattgatttcacggaggatggtgg

SEQ ID NO: 82019 - DNA, 120 bp, Homo sapiens; identical to SEQ ID NO: 57879
  misc_feature: 428 for SV(C|O) and mtDNA

SEQ ID NO: 82020 - DNA, 120 bp, Homo sapiens
  misc_feature: 427 for SV(C|O) and mtDNA
ttttaggtagagggggattgttgtttggaagggggatgcgggggaaatgttgttagtaatgagaaatcctgcgaataggcttccggctgtcaggcgtttaatggggtttagtagggtggg

SEQ ID NO: 82021 - DNA, 120 bp, Homo sapiens
  misc_feature: 427 for SV(C|O) and mtDNA
ttaagttgagtagtaggaatgcggtagtagttaggataatataaatagttaaattaagaatggttatgttagggttgtacggtagaactgctattattcatcctatgtgggtaattgagg

SEQ ID NO: 82022 - DNA, 120 bp, Homo sapiens
  misc_feature: 427 for SV(C|O) and mtDNA
tgtttggaagggggatgcgggggaaatgttgttagtaatgagaaatcctgcgaataggcttccggctgtcaggcgtttaatggggtttagtagggtggggttattttcgttaatgttagt

SEQ ID NO: 82023 - DNA, 120 bp, Homo sapiens
  misc_feature: 427 for SV(C|O) and mtDNA
tgatgcttgtcccttttgatcgtggtgatttagagggtgaactcactggaacggggatgcttgcatgtgtaatcttactaagagctaatagaaaggctaggaccaaacctatttgtttat

SEQ ID NO: 82024 - DNA, 120 bp, Homo sapiens
  misc_feature: 427 for SV(C|O) and mtDNA
gtgtagagttcaggggagagtgcgtcatatgttgttcctaggaagattgtagtggtgagggtgtttattataataatgtttgtgtattcggctatgaagaataaggcgaaggggcctgcg

SEQ ID NO: 82025 - DNA, 120 bp, Homo sapiens; identical to SEQ ID NO: 61423
  misc_feature: 427 for SV(C|O) and mtDNA

SEQ ID NO: 82026 - DNA, 120 bp, Homo sapiens
  misc_feature: 427 for SV(C|O) and mtDNA
gatgcttgtcccttttgatcgtggtgatttagagggtgaactcactggaacggggatgcttgcatgtgtaatcttactaagagctaatagaaaggctaggaccaaacctatttgtttatg

SEQ ID NO: 82027 - DNA, 120 bp, Homo sapiens
  misc_feature: 427 for SV(C|O) and mtDNA
aacctccctcaccattggcagcctagcattagcaggaatacctttcctcacaggtttctactccaaagaccacatcatcgaaaccgcaaacatatcatacacaaacgcctgagccctatc

SEQ ID NO: 82028 - DNA, 120 bp, Homo sapiens
  misc_feature: 427 for SV(C|O) and mtDNA
ctgggtttggtttaatccacctcaactgcctgctatgatggataagattgagagagtgaggagaaggcttacgtttagtgagggagagatttggtatatgattgagatgggggctagttt

SEQ ID NO: 82029 - DNA, 120 bp, Homo sapiens; identical to SEQ ID NO: 59564
  misc_feature: 427 for SV(C|O) and mtDNA

SEQ ID NO: 82030 - DNA, 120 bp, Homo sapiens
  misc_feature: 426 for SV(C|O) and mtDNA
tttggaagggggatgcgggggaaatgttgttagtaatgagaaatcctgcgaataggcttccggctgtcaggcgtttaatggggtttagtagggtggggttattttcgttaatgttagtaa

SEQ ID NO: 82031 - DNA, 120 bp, Homo sapiens; identical to SEQ ID NO: 58975
  misc_feature: 426 for SV(C|O) and mtDNA

SEQ ID NO: 82032 - DNA, 120 bp, Homo sapiens
  misc_feature: 426 for SV(C|O) and mtDNA
tgttgtttggaagggggatgcgggggaaatgttgttagtaatgagaaatcctgcgaataggcttccggctgtcaggcgtttaatggggtttagtagggtggggttattttcgttaatgtt

SEQ ID NO: 82033 - DNA, 120 bp, Homo sapiens
  misc_feature: 426 for SV(C|O) and mtDNA
tacttctcctatctctcccagtcctagctgctggcatcactatactactaacagaccgcaacctcaacaccaccttcttcgaccccgccggaggaggagaccccattctataccaacacc

SEQ ID NO: 82034 - DNA, 120 bp, Homo sapiens; identical to SEQ ID NO: 57493
  misc_feature: 426 for SV(C|O) and mtDNA

SEQ ID NO: 82035 - DNA, 120 bp, Homo sapiens; identical to SEQ ID NO: 60093
  misc_feature: 426 for SV(C|O) and mtDNA

SEQ ID NO: 82036 - DNA, 120 bp, Homo sapiens; identical to SEQ ID NO: 61810
  misc_feature: 426 for SV(C|O) and mtDNA

SEQ ID NO: 82037 - DNA, 120 bp, Homo sapiens; identical to SEQ ID NO: 61469
  misc_feature: 426 for SV(C|O) and mtDNA

SEQ ID NO: 82038 - DNA, 120 bp, Homo sapiens; identical to SEQ ID NO: 59416
  misc_feature: 426 for SV(C|O) and mtDNA

SEQ ID NO: 82039 - DNA, 120 bp, Homo sapiens
  misc_feature: 426 for SV(C|O) and mtDNA
cattggcagcctagcattagcaggaatacctttcctcacaggtttctactccaaagaccacatcatcgaaaccgcaaacatatcatacacaaacgcctgagccctatctattactctcat

SEQ ID NO: 82040 - DNA, 120 bp, Homo sapiens
  misc_feature: 426 for SV(C|O) and mtDNA
agttgagtagtaggaatgcggtagtagttaggataatataaatagttaaattaagaatggttatgttagggttgtacggtagaactgctattattcatcctatgtgggtaattgaggagt

SEQ ID NO: 82041 - DNA, 120 bp, Homo sapiens; identical to SEQ ID NO: 60717
  misc_feature: 426 for SV(C|O) and mtDNA

SEQ ID NO: 82042 - DNA, 120 bp, Homo sapiens
  misc_feature: 426 for SV(C|O) and mtDNA
acctccctcaccattggcagcctagcattagcaggaatacctttcctcacaggtttctactccaaagaccacatcatcgaaaccgcaaacatatcatacacaaacgcctgagccctatct

SEQ ID NO: 82043 - DNA, 120 bp, Homo sapiens
  misc_feature: 425 for SV(C|O) and mtDNA
gacaaaaactagcccccatctcaatcatataccaaatctctccctcactaaacgtaagccttctcctcactctctcaatcttatccatcatagcaggcagttgaggtggattaaaccaaa

SEQ ID NO: 82044 - DNA, 120 bp, Homo sapiens; identical to SEQ ID NO: 61956
  misc_feature: 425 for SV(C|O) and mtDNA

SEQ ID NO: 82045 - DNA, 120 bp, Homo sapiens
  misc_feature: 425 for SV(C|O) and mtDNA
tggcagcctagcattagcaggaatacctttcctcacaggtttctactccaaagaccacatcatcgaaaccgcaaacatatcatacacaaacgcctgagccctatctattactctcatcgc

SEQ ID NO: 82046 - DNA, 120 bp, Homo sapiens
  misc_feature: 425 for SV(C|O) and mtDNA
cccagctacgcaaaatcttagcatactcctcaattacccacataggatgaataatagcagttctaccgtacaaccctaacataaccattcttaatttaactatttatattatcctaacta

SEQ ID NO: 82047 - DNA, 120 bp, Homo sapiens
  misc_feature: 425 for SV(C|O) and mtDNA
tagttaaactttcgtttattgctaaaggttaatcactgctgtttcccgtgggggtgtggctaggctaagcgttttgagctgcattgctgcgtgcttgatgcttgtcccttttgatcgtgg

SEQ ID NO: 82048 - DNA, 120 bp, Homo sapiens; identical to SEQ ID NO: 61331
  misc_feature: 425 for SV(C|O) and mtDNA

SEQ ID NO: 82049 - DNA, 120 bp, Homo sapiens; identical to SEQ ID NO: 59937
  misc_feature: 425 for SV(C|O) and mtDNA

SEQ ID NO: 82050 - DNA, 120 bp, Homo sapiens
  misc_feature: 425 for SV(C|O) and mtDNA
ctcccagtcctagctgctggcatcactatactactaacagaccgcaacctcaacaccaccttcttcgaccccgccggaggaggagaccccattctataccaacacctattctgatttttc

SEQ ID NO: 82051 - DNA, 120 bp, Homo sapiens
  misc_feature: 425 for SV(C|O) and mtDNA
acttctcctatctctcccagtcctagctgctggcatcactatactactaacagaccgcaacctcaacaccaccttcttcgaccccgccggaggaggagaccccattctataccaacacct

SEQ ID NO: 82052 - DNA, 120 bp, Homo sapiens; identical to SEQ ID NO: 61876
  misc_feature: 425 for SV(C|O) and mtDNA

SEQ ID NO: 82053 - DNA, 120 bp, Homo sapiens
  misc_feature: 424 for SV(C|O) and mtDNA
gcagcctagcattagcaggaatacctttcctcacaggtttctactccaaagaccacatcatcgaaaccgcaaacatatcatacacaaacgcctgagccctatctattactctcatcgcta

SEQ ID NO: 82054 - DNA, 120 bp, Homo sapiens
  misc_feature: 424 for SV(C|O) and mtDNA
cctccctcaccattggcagcctagcattagcaggaatacctttcctcacaggtttctactccaaagaccacatcatcgaaaccgcaaacatatcatacacaaacgcctgagccctatcta

SEQ ID NO: 82055 - DNA, 120 bp, Homo sapiens
  misc_feature: 424 for SV(C|O) and mtDNA
atttgtttatggggtgatgtgagcccgtctaaacattttcagtgtattgctttgaggaggtaagctacataaactgtggggggtgtctttggggtttggttggttcggggtatggggtta

SEQ ID NO: 82056 - DNA, 120 bp, Homo sapiens; identical to SEQ ID NO: 61465
  misc_feature: 424 for SV(C|O) and mtDNA

SEQ ID NO: 82057 - DNA, 120 bp, Homo sapiens
  misc_feature: 424 for SV(C|O) and mtDNA
gattgttgtttggaagggggatgcgggggaaatgttgttagtaatgagaaatcctgcgaataggcttccggctgtcaggcgtttaatggggtttagtagggtggggttattttcgttaat

SEQ ID NO: 82058 - DNA, 120 bp, Homo sapiens
  misc_feature: 423 for SV(C|O) and mtDNA
atgacaaaaactagcccccatctcaatcatataccaaatctctccctcactaaacgtaagccttctcctcactctctcaatcttatccatcatagcaggcagttgaggtggattaaacca

SEQ ID NO: 82059 - DNA, 120 bp, Homo sapiens; identical to SEQ ID NO: 61570
  misc_feature: 423 for SV(C|O) and mtDNA

SEQ ID NO: 82060 - DNA, 120 bp, Homo sapiens
  misc_feature: 423 for SV(C|O) and mtDNA
ctattgacttgggttaatcgtgtgaccgcggtggctggcacgaaattgaccaaccctggggttagtatagcttagttaaactttcgtttattgctaaaggttaatcactgctgtttcccg

SEQ ID NO: 82061 - DNA, 120 bp, Homo sapiens
  misc_feature: 423 for SV(C|O) and mtDNA
cctatttgtttatggggtgatgtgagcccgtctaaacattttcagtgtattgctttgaggaggtaagctacataaactgtggggggtgtctttggggtttggttggttcggggtatgggg

SEQ ID NO: 82062 - DNA, 120 bp, Homo sapiens; identical to SEQ ID NO: 61893
  misc_feature: 423 for SV(C|O) and mtDNA

SEQ ID NO: 82063 - DNA, 120 bp, Homo sapiens
  misc_feature: 423 for SV(C|O) and mtDNA
attgacttgggttaatcgtgtgaccgcggtggctggcacgaaattgaccaaccctggggttagtatagcttagttaaactttcgtttattgctaaaggttaatcactgctgtttcccgtg

SEQ ID NO: 82064 - DNA, 120 bp, Homo sapiens
  misc_feature: 423 for SV(C|O) and mtDNA
agttaaactttcgtttattgctaaaggttaatcactgctgtttcccgtgggggtgtggctaggctaagcgttttgagctgcattgctgcgtgcttgatgcttgtcccttttgatcgtggt

SEQ ID NO: 82065 - DNA, 120 bp, Homo sapiens
  misc_feature: 422 for SV(C|O) and mtDNA
tattgacttgggttaatcgtgtgaccgcggtggctggcacgaaattgaccaaccctggggttagtatagcttagttaaactttcgtttattgctaaaggttaatcactgctgtttcccgt

SEQ ID NO: 82066 - DNA, 120 bp, Homo sapiens
  misc_feature: 422 for SV(C|O) and mtDNA
gttgtttggaagggggatgcgggggaaatgttgttagtaatgagaaatcctgcgaataggcttccggctgtcaggcgtttaatggggtttagtagggtggggttattttcgttaatgtta

SEQ ID NO: 82067 - DNA, 120 bp, Homo sapiens; identical to SEQ ID NO: 61067
  misc_feature: 422 for SV(C|O) and mtDNA

SEQ ID NO: 82068 - DNA, 120 bp, Homo sapiens; identical to SEQ ID NO: 61794
  misc_feature: 422 for SV(C|O) and mtDNA

SEQ ID NO: 82069 - DNA, 120 bp, Homo sapiens; identical to SEQ ID NO: 61860
  misc_feature: 422 for SV(C|O) and mtDNA

SEQ ID NO: 82070 - DNA, 120 bp, Homo sapiens; identical to SEQ ID NO: 61406
  misc_feature: 422 for SV(C|O) and mtDNA

SEQ ID NO: 82071 - DNA, 120 bp, Homo sapiens
  misc_feature: 421 for SV(C|O) and mtDNA
tgacaaaaactagcccccatctcaatcatataccaaatctctccctcactaaacgtaagccttctcctcactctctcaatcttatccatcatagcaggcagttgaggtggattaaaccaa

SEQ ID NO: 82072 - DNA, 120 bp, Homo sapiens
  misc_feature: 421 for SV(C|O) and mtDNA
tatttgtttatggggtgatgtgagcccgtctaaacattttcagtgtattgctttgaggaggtaagctacataaactgtggggggtgtctttggggtttggttggttcggggtatggggtt

SEQ ID NO: 82073 - DNA, 120 bp, Homo sapiens
  misc_feature: 421 for SV(C|O) and mtDNA
cttgtcccttttgatcgtggtgatttagagggtgaactcactggaacggggatgcttgcatgtgtaatcttactaagagctaatagaaaggctaggaccaaacctatttgtttatggggt

SEQ ID NO: 82074 - DNA, 120 bp, Homo sapiens
  misc_feature: 421 for SV(C|O) and mtDNA
ctccctcaccattggcagcctagcattagcaggaatacctttcctcacaggtttctactccaaagaccacatcatcgaaaccgcaaacatatcatacacaaacgcctgagccctatctat

SEQ ID NO: 82075 - DNA, 120 bp, Homo sapiens
  misc_feature: 421 for SV(C|O) and mtDNA
ctaccctcccttagcagggaactactcccaccctggagcctccgtagacctaaccatcttctccttacacctagcaggtgtctcctctatcttaggggccatcaacttcatcacaacaat

SEQ ID NO: 82076 - DNA, 120 bp, Homo sapiens
  misc_feature: 421 for SV(C|O) and mtDNA
acctatttgtttatggggtgatgtgagcccgtctaaacattttcagtgtattgctttgaggaggtaagctacataaactgtggggggtgtctttggggtttggttggttcggggtatggg

SEQ ID NO: 82077 - DNA, 120 bp, Homo sapiens; identical to SEQ ID NO: 61728
  misc_feature: 421 for SV(C|O) and mtDNA

SEQ ID NO: 82078 - DNA, 120 bp, Homo sapiens
  misc_feature: 421 for SV(C|O) and mtDNA
aaataaaaaattataacaaaccctgagaaccaaaatgaacgaaaatctgttcgcttcattcattgcccccacaatcctaggcctacccgccgcagtactgatcattctatttccccctct

SEQ ID NO: 82079 - DNA, 120 bp, Homo sapiens
  misc_feature: 420 for SV(C|O) and mtDNA
tttatattgataattgttgtgatgaagttgatggcccctaagatagaggagacacctgctaggtgtaaggagaagatggttaggtctacggaggctccagggtgggagtagttccctgct

SEQ ID NO: 82080 - DNA, 120 bp, Homo sapiens
  misc_feature: 420 for SV(C|O) and mtDNA
ttggaagggggatgcgggggaaatgttgttagtaatgagaaatcctgcgaataggcttccggctgtcaggcgtttaatggggtttagtagggtggggttattttcgttaatgttagtaag

SEQ ID NO: 82081 - DNA, 120 bp, Homo sapiens
  misc_feature: 420 for SV(C|O) and mtDNA
gaatacgccgcaggccccttcgccttattcttcatagccgaatacacaaacattattataataaacaccctcaccactacaatcttcctaggaacaacatatgacgcactctcccctgaa

SEQ ID NO: 82082 - DNA, 120 bp, Homo sapiens; identical to SEQ ID NO: 61900
  misc_feature: 420 for SV(C|O) and mtDNA

SEQ ID NO: 82083 - DNA, 120 bp, Homo sapiens
  misc_feature: 420 for SV(C|O) and mtDNA
gttgagtagtaggaatgcggtagtagttaggataatataaatagttaaattaagaatggttatgttagggttgtacggtagaactgctattattcatcctatgtgggtaattgaggagta

SEQ ID NO: 82084 - DNA, 120 bp, Homo sapiens
  misc_feature: 420 for SV(C|O) and mtDNA
gtggggccttctatggctgaggggagtcaggggtggagacctaattgggctgatttgcctgctgctgctaggaggaggcctagtagtggggtgaggcttggattagcgtttagaagggct

SEQ ID NO: 82085 - DNA, 120 bp, Homo sapiens; identical to SEQ ID NO: 61086
  misc_feature: 420 for SV(C|O) and mtDNA

SEQ ID NO: 82086 - DNA, 120 bp, Homo sapiens
  misc_feature: 420 for SV(C|O) and mtDNA
aaaggccccaacgttgtaggcccctacgggctactacaacccttcgctgacgccataaaactcttcaccaaagagcccctaaaacccgccacatctaccatcaccctctacatcaccgcc

SEQ ID NO: 82087 - DNA, 120 bp, Homo sapiens
  misc_feature: 420 for SV(C|O) and mtDNA
ggcagcctagcattagcaggaatacctttcctcacaggtttctactccaaagaccacatcatcgaaaccgcaaacatatcatacacaaacgcctgagccctatctattactctcatcgct

SEQ ID NO: 82088 - DNA, 120 bp, Homo sapiens; identical to SEQ ID NO: 62065
  misc_feature: 420 for SV(C|O) and mtDNA

SEQ ID NO: 82089 - DNA, 120 bp, Homo sapiens; identical to SEQ ID NO: 62132
  misc_feature: 420 for SV(C|O) and mtDNA

SEQ ID NO: 82090 - DNA, 120 bp, Homo sapiens
  misc_feature: 419 for SV(C|O) and mtDNA
tttgtttatggggtgatgtgagcccgtctaaacattttcagtgtattgctttgaggaggtaagctacataaactgtggggggtgtctttggggtttggttggttcggggtatggggttag

SEQ ID NO: 82091 - DNA, 120 bp, Homo sapiens; identical to SEQ ID NO: 60936
  misc_feature: 419 for SV(C|O) and mtDNA

SEQ ID NO: 82092 - DNA, 120 bp, Homo sapiens
  misc_feature: 419 for SV(C|O) and mtDNA
ttgtttggaagggggatgcgggggaaatgttgttagtaatgagaaatcctgcgaataggcttccggctgtcaggcgtttaatggggtttagtagggtggggttattttcgttaatgttag

SEQ ID NO: 82093 - DNA, 120 bp, Homo sapiens
  misc_feature: 419 for SV(C|O) and mtDNA
ttgtcccttttgatcgtggtgatttagagggtgaactcactggaacggggatgcttgcatgtgtaatcttactaagagctaatagaaaggctaggaccaaacctatttgtttatggggtg

SEQ ID NO: 82094 - DNA, 120 bp, Homo sapiens; identical to SEQ ID NO: 62207
  misc_feature: 419 for SV(C|O) and mtDNA

SEQ ID NO: 82095 - DNA, 120 bp, Homo sapiens
  misc_feature: 419 for SV(C|O) and mtDNA
tctcccagtcctagctgctggcatcactatactactaacagaccgcaacctcaacaccaccttcttcgaccccgccggaggaggagaccccattctataccaacacctattctgattttt

SEQ ID NO: 82096 - DNA, 120 bp, Homo sapiens; identical to SEQ ID NO: 61650
  misc_feature: 419 for SV(C|O) and mtDNA

SEQ ID NO: 82097 - DNA, 120 bp, Homo sapiens
  misc_feature: 419 for SV(C|O) and mtDNA
ggcacccctctgacatccggcctgcttcttctcacatgacaaaaactagcccccatctcaatcatataccaaatctctccctcactaaacgtaagccttctcctcactctctcaatctta

SEQ ID NO: 82098 - DNA, 120 bp, Homo sapiens; identical to SEQ ID NO: 61742
  misc_feature: 419 for SV(C|O) and mtDNA

SEQ ID NO: 82099 - DNA, 120 bp, Homo sapiens
  misc_feature: 419 for SV(C|O) and mtDNA
aatacgccgcaggccccttcgccttattcttcatagccgaatacacaaacattattataataaacaccctcaccactacaatcttcctaggaacaacatatgacgcactctcccctgaac

SEQ ID NO: 82100 - DNA, 120 bp, Homo sapiens
  misc_feature: 419 for SV(C|O) and mtDNA
ggttttatattgataattgttgtgatgaagttgatggcccctaagatagaggagacacctgctaggtgtaaggagaagatggttaggtctacggaggctccagggtgggagtagttccct

SEQ ID NO: 82101 - DNA, 120 bp, Homo sapiens
  misc_feature: 419 for SV(C|O) and mtDNA
catgacaaaaactagcccccatctcaatcatataccaaatctctccctcactaaacgtaagccttctcctcactctctcaatcttatccatcatagcaggcagttgaggtggattaaacc

SEQ ID NO: 82102 - DNA, 120 bp, Homo sapiens
  misc_feature: 419 for SV(C|O) and mtDNA
gcttgtcccttttgatcgtggtgatttagagggtgaactcactggaacggggatgcttgcatgtgtaatcttactaagagctaatagaaaggctaggaccaaacctatttgtttatgggg

SEQ ID NO: 82103 - DNA, 120 bp, Homo sapiens
  misc_feature: 419 for SV(C|O) and mtDNA
accattggcagcctagcattagcaggaatacctttcctcacaggtttctactccaaagaccacatcatcgaaaccgcaaacatatcatacacaaacgcctgagccctatctattactctc

SEQ ID NO: 82104 - DNA, 120 bp, Homo sapiens; identical to SEQ ID NO: 61389
  misc_feature: 419 for SV(C|O) and mtDNA

SEQ ID NO: 82105 - DNA, 120 bp, Homo sapiens
  misc_feature: 419 for SV(C|O) and mtDNA
atggccctgaagtaggaaccagatgtcggatacagttcactttagctacccccaagtgttatgggcccggagcgaggagagtagcactcttgtgcgggatattgatttcacggaggatgg

SEQ ID NO: 82106 - DNA, 120 bp, Homo sapiens
  misc_feature: 419 for SV(C|O) and mtDNA
ccaacgttgtaggcccctacgggctactacaacccttcgctgacgccataaaactcttcaccaaagagcccctaaaacccgccacatctaccatcaccctctacatcaccgccccgacct

SEQ ID NO: 82107 - DNA, 120 bp, Homo sapiens
  misc_feature: 419 for SV(C|O) and mtDNA
caaactaccacctacctccctcaccaaagcccataaaaataaaaaattataacaaaccctgagaaccaaaatgaacgaaaatctgttcgcttcattcattgcccccacaatcctaggcct

SEQ ID NO: 82108 - DNA, 120 bp, Homo sapiens; identical to SEQ ID NO: 61848
  misc_feature: 418 for SV(C|O) and mtDNA

SEQ ID NO: 82109 - DNA, 120 bp, Homo sapiens
  misc_feature: 418 for SV(C|O) and mtDNA
tggaagggggatgcgggggaaatgttgttagtaatgagaaatcctgcgaataggcttccggctgtcaggcgtttaatggggtttagtagggtggggttattttcgttaatgttagtaagg

SEQ ID NO: 82110 - DNA, 120 bp, Homo sapiens
  misc_feature: 418 for SV(C|O) and mtDNA
ccattggcagcctagcattagcaggaatacctttcctcacaggtttctactccaaagaccacatcatcgaaaccgcaaacatatcatacacaaacgcctgagccctatctattactctca

SEQ ID NO: 82111 - DNA, 120 bp, Homo sapiens; identical to SEQ ID NO: 62006
  misc_feature: 418 for SV(C|O) and mtDNA

SEQ ID NO: 82112 - DNA, 120 bp, Homo sapiens
  misc_feature: 418 for SV(C|O) and mtDNA
acatgacaaaaactagcccccatctcaatcatataccaaatctctccctcactaaacgtaagccttctcctcactctctcaatcttatccatcatagcaggcagttgaggtggattaaac

SEQ ID NO: 82113 - DNA, 120 bp, Homo sapiens; identical to SEQ ID NO: 61869
  misc_feature: 418 for SV(C|O) and mtDNA

SEQ ID NO: 82114 - DNA, 120 bp, Homo sapiens; identical to SEQ ID NO: 60969
  misc_feature: 418 for SV(C|O) and mtDNA

SEQ ID NO: 82115 - DNA, 120 bp, Homo sapiens; identical to SEQ ID NO: 60710
  misc_feature: 418 for SV(C|O) and mtDNA

SEQ ID NO: 82116 - DNA, 120 bp, Homo sapiens; identical to SEQ ID NO: 62098
  misc_feature: 418 for SV(C|O) and mtDNA

SEQ ID NO: 82117 - DNA, 120 bp, Homo sapiens
  misc_feature: 417 for SV(C|O) and mtDNA
ttgttgtttggaagggggatgcgggggaaatgttgttagtaatgagaaatcctgcgaataggcttccggctgtcaggcgtttaatggggtttagtagggtggggttattttcgttaatgt

SEQ ID NO: 82118 - DNA, 120 bp, Homo sapiens
  misc_feature: 417 for SV(C|O) and mtDNA
ttatattgataattgttgtgatgaagttgatggcccctaagatagaggagacacctgctaggtgtaaggagaagatggttaggtctacggaggctccagggtgggagtagttccctgcta

SEQ ID NO: 82119 - DNA, 120 bp, Homo sapiens
  misc_feature: 417 for SV(C|O) and mtDNA
ttagttaaactttcgtttattgctaaaggttaatcactgctgtttcccgtgggggtgtggctaggctaagcgttttgagctgcattgctgcgtgcttgatgcttgtcccttttgatcgtg

SEQ ID NO: 82120 - DNA, 120 bp, Homo sapiens
  misc_feature: 417 for SV(C|O) and mtDNA
tgtcccttttgatcgtggtgatttagagggtgaactcactggaacggggatgcttgcatgtgtaatcttactaagagctaatagaaaggctaggaccaaacctatttgtttatggggtga

SEQ ID NO: 82121 - DNA, 120 bp, Homo sapiens
  misc_feature: 417 for SV(C|O) and mtDNA
tggggccttctatggctgaggggagtcaggggtggagacctaattgggctgatttgcctgctgctgctaggaggaggcctagtagtggggtgaggcttggattagcgtttagaagggcta

SEQ ID NO: 82122 - DNA, 120 bp, Homo sapiens
  misc_feature: 417 for SV(C|O) and mtDNA
tcccttttgatcgtggtgatttagagggtgaactcactggaacggggatgcttgcatgtgtaatcttactaagagctaatagaaaggctaggaccaaacctatttgtttatggggtgatg

SEQ ID NO: 82123 - DNA, 120 bp, Homo sapiens; identical to SEQ ID NO: 61760
  misc_feature: 417 for SV(C|O) and mtDNA

SEQ ID NO: 82124 - DNA, 120 bp, Homo sapiens
  misc_feature: 417 for SV(C|O) and mtDNA
ggtggggccttctatggctgaggggagtcaggggtggagacctaattgggctgatttgcctgctgctgctaggaggaggcctagtagtggggtgaggcttggattagcgtttagaagggc

SEQ ID NO: 82125 - DNA, 120 bp, Homo sapiens
  misc_feature: 416 for SV(C|O) and mtDNA
ttgtttatggggtgatgtgagcccgtctaaacattttcagtgtattgctttgaggaggtaagctacataaactgtggggggtgtctttggggtttggttggttcggggtatggggttagc

SEQ ID NO: 82126 - DNA, 120 bp, Homo sapiens; identical to SEQ ID NO: 61855
  misc_feature: 416 for SV(C|O) and mtDNA

SEQ ID NO: 82127 - DNA, 120 bp, Homo sapiens
  misc_feature: 416 for SV(C|O) and mtDNA
cggtagtagttaggataatataaatagttaaattaagaatggttatgttagggttgtacggtagaactgctattattcatcctatgtgggtaattgaggagtatgctaagattttgcgta

SEQ ID NO: 82128 - DNA, 120 bp, Homo sapiens; identical to SEQ ID NO: 62197
  misc_feature: 416 for SV(C|O) and mtDNA

SEQ ID NO: 82129 - DNA, 120 bp, Homo sapiens; identical to SEQ ID NO: 62192
  misc_feature: 416 for SV(C|O) and mtDNA

SEQ ID NO: 82130 - DNA, 120 bp, Homo sapiens
  misc_feature: 416 for SV(C|O) and mtDNA
ggtagtagttaggataatataaatagttaaattaagaatggttatgttagggttgtacggtagaactgctattattcatcctatgtgggtaattgaggagtatgctaagattttgcgtag

SEQ ID NO: 82131 - DNA, 120 bp, Homo sapiens
  misc_feature: 416 for SV(C|O) and mtDNA
gagagtccgaactagtctcaggcttcaacatcgaatacgccgcaggccccttcgccttattcttcatagccgaatacacaaacattattataataaacaccctcaccactacaatcttcc

SEQ ID NO: 82132 - DNA, 120 bp, Homo sapiens
  misc_feature: 416 for SV(C|O) and mtDNA
aggaatgcggtagtagttaggataatataaatagttaaattaagaatggttatgttagggttgtacggtagaactgctattattcatcctatgtgggtaattgaggagtatgctaagatt

SEQ ID NO: 82133 - DNA, 120 bp, Homo sapiens
  misc_feature: 415 for SV(C|O) and mtDNA
ttgagtagtaggaatgcggtagtagttaggataatataaatagttaaattaagaatggttatgttagggttgtacggtagaactgctattattcatcctatgtgggtaattgaggagtat

SEQ ID NO: 82134 - DNA, 120 bp, Homo sapiens
  misc_feature: 415 for SV(C|O) and mtDNA
tctctcccagtcctagctgctggcatcactatactactaacagaccgcaacctcaacaccaccttcttcgaccccgccggaggaggagaccccattctataccaacacctattctgattt

SEQ ID NO: 82135 - DNA, 120 bp, Homo sapiens; identical to SEQ ID NO: 59048
  misc_feature: 415 for SV(C|O) and mtDNA

SEQ ID NO: 82136 - DNA, 120 bp, Homo sapiens
  misc_feature: 415 for SV(C|O) and mtDNA
taggaatgcggtagtagttaggataatataaatagttaaattaagaatggttatgttagggttgtacggtagaactgctattattcatcctatgtgggtaattgaggagtatgctaagat

SEQ ID NO: 82137 - DNA, 120 bp, Homo sapiens; identical to SEQ ID NO: 61884
  misc_feature: 415 for SV(C|O) and mtDNA

SEQ ID NO: 82138 - DNA, 120 bp, Homo sapiens
  misc_feature: 415 for SV(C|O) and mtDNA
ggggtggggccttctatggctgaggggagtcaggggtggagacctaattgggctgatttgcctgctgctgctaggaggaggcctagtagtggggtgaggcttggattagcgtttagaagg

SEQ ID NO: 82139 - DNA, 120 bp, Homo sapiens
  misc_feature: 415 for SV(C|O) and mtDNA
gcacccctctgacatccggcctgcttcttctcacatgacaaaaactagcccccatctcaatcatataccaaatctctccctcactaaacgtaagccttctcctcactctctcaatcttat

SEQ ID NO: 82140 - DNA, 120 bp, Homo sapiens
  misc_feature: 415 for SV(C|O) and mtDNA
aaaataaaaaattataacaaaccctgagaaccaaaatgaacgaaaatctgttcgcttcattcattgcccccacaatcctaggcctacccgccgcagtactgatcattctatttccccctc

SEQ ID NO: 82141 - DNA, 120 bp, Homo sapiens
  misc_feature: 415 for SV(C|O) and mtDNA
ctctcccagtcctagctgctggcatcactatactactaacagaccgcaacctcaacaccaccttcttcgaccccgccggaggaggagaccccattctataccaacacctattctgatttt

SEQ ID NO: 82142 - DNA, 120 bp, Homo sapiens
  misc_feature: 415 for SV(C|O) and mtDNA
ctcaccattggcagcctagcattagcaggaatacctttcctcacaggtttctactccaaagaccacatcatcgaaaccgcaaacatatcatacacaaacgcctgagccctatctattact

SEQ ID NO: 82143 - DNA, 120 bp, Homo sapiens
  misc_feature: 414 for SV(C|O) and mtDNA
ttctcctatctctcccagtcctagctgctggcatcactatactactaacagaccgcaacctcaacaccaccttcttcgaccccgccggaggaggagaccccattctataccaacacctat

SEQ ID NO: 82144 - DNA, 120 bp, Homo sapiens; identical to SEQ ID NO: 60726
  misc_feature: 414 for SV(C|O) and mtDNA

SEQ ID NO: 82145 - DNA, 120 bp, Homo sapiens
  misc_feature: 414 for SV(C|O) and mtDNA
tccctcaccattggcagcctagcattagcaggaatacctttcctcacaggtttctactccaaagaccacatcatcgaaaccgcaaacatatcatacacaaacgcctgagccctatctatt

SEQ ID NO: 82146 - DNA, 120 bp, Homo sapiens
  misc_feature: 414 for SV(C|O) and mtDNA
tcaccattggcagcctagcattagcaggaatacctttcctcacaggtttctactccaaagaccacatcatcgaaaccgcaaacatatcatacacaaacgcctgagccctatctattactc

SEQ ID NO: 82147 - DNA, 120 bp, Homo sapiens
  misc_feature: 414 for SV(C|O) and mtDNA
gtcccttttgatcgtggtgatttagagggtgaactcactggaacggggatgcttgcatgtgtaatcttactaagagctaatagaaaggctaggaccaaacctatttgtttatggggtgat

SEQ ID NO: 82148 - DNA, 120 bp, Homo sapiens
  misc_feature: 414 for SV(C|O) and mtDNA
gtagtagttaggataatataaatagttaaattaagaatggttatgttagggttgtacggtagaactgctattattcatcctatgtgggtaattgaggagtatgctaagattttgcgtagc

SEQ ID NO: 82149 - DNA, 120 bp, Homo sapiens
  misc_feature: 414 for SV(C|O) and mtDNA
aaggccccaacgttgtaggcccctacgggctactacaacccttcgctgacgccataaaactcttcaccaaagagcccctaaaacccgccacatctaccatcaccctctacatcaccgccc

SEQ ID NO: 82150 - DNA, 120 bp, Homo sapiens
  misc_feature: 414 for SV(C|O) and mtDNA
ggccccaacgttgtaggcccctacgggctactacaacccttcgctgacgccataaaactcttcaccaaagagcccctaaaacccgccacatctaccatcaccctctacatcaccgccccg

SEQ ID NO: 82151 - DNA, 120 bp, Homo sapiens; identical to SEQ ID NO: 58542
  misc_feature: 414 for SV(C|O) and mtDNA

SEQ ID NO: 82152 - DNA, 120 bp, Homo sapiens
  misc_feature: 414 for SV(C|O) and mtDNA
aacaaatagcccttctaaacgctaatccaagcctcaccccactactaggcctcctcctagcagcagcaggcaaatcagcccaattaggtctccacccctgactcccctcagccatagaag

SEQ ID NO: 82153 - DNA, 120 bp, Homo sapiens; identical to SEQ ID NO: 61906
  misc_feature: 414 for SV(C|O) and mtDNA

SEQ ID NO: 82154 - DNA, 120 bp, Homo sapiens
  misc_feature: 414 for SV(C|O) and mtDNA
atacgccgcaggccccttcgccttattcttcatagccgaatacacaaacattattataataaacaccctcaccactacaatcttcctaggaacaacatatgacgcactctcccctgaact

SEQ ID NO: 82155 - DNA, 120 bp, Homo sapiens
  misc_feature: 413 for SV(C|O) and mtDNA
ttttatattgataattgttgtgatgaagttgatggcccctaagatagaggagacacctgctaggtgtaaggagaagatggttaggtctacggaggctccagggtgggagtagttccctgc

SEQ ID NO: 82156 - DNA, 120 bp, Homo sapiens
  misc_feature: 413 for SV(C|O) and mtDNA
ttatcctacactccaactcatgagacccacaacaaatagcccttctaaacgctaatccaagcctcaccccactactaggcctcctcctagcagcagcaggcaaatcagcccaattaggtc

SEQ ID NO: 82157 - DNA, 120 bp, Homo sapiens; identical to SEQ ID NO: 62126
  misc_feature: 413 for SV(C|O) and mtDNA

SEQ ID NO: 82158 - DNA, 120 bp, Homo sapiens
  misc_feature: 413 for SV(C|O) and mtDNA
aaactaccacctacctccctcaccaaagcccataaaaataaaaaattataacaaaccctgagaaccaaaatgaacgaaaatctgttcgcttcattcattgcccccacaatcctaggccta

SEQ ID NO: 82159 - DNA, 120 bp, Homo sapiens; identical to SEQ ID NO: 61901
  misc_feature: 413 for SV(C|O) and mtDNA

SEQ ID NO: 82160 - DNA, 120 bp, Homo sapiens; identical to SEQ ID NO: 58963
  misc_feature: 413 for SV(C|O) and mtDNA

SEQ ID NO: 82161 - DNA, 120 bp, Homo sapiens; identical to SEQ ID NO: 61214
  misc_feature: 413 for SV(C|O) and mtDNA

SEQ ID NO: 82162 - DNA, 120 bp, Homo sapiens
  misc_feature: 413 for SV(C|O) and mtDNA
gagtagtaggaatgcggtagtagttaggataatataaatagttaaattaagaatggttatgttagggttgtacggtagaactgctattattcatcctatgtgggtaattgaggagtatgc

SEQ ID NO: 82163 - DNA, 120 bp, Homo sapiens
  misc_feature: 413 for SV(C|O) and mtDNA
atcctacactccaactcatgagacccacaacaaatagcccttctaaacgctaatccaagcctcaccccactactaggcctcctcctagcagcagcaggcaaatcagcccaattaggtctc

SEQ ID NO: 82164 - DNA, 120 bp, Homo sapiens; identical to SEQ ID NO: 59098
  misc_feature: 413 for SV(C|O) and mtDNA

SEQ ID NO: 82165 - DNA, 120 bp, Homo sapiens
  misc_feature: 413 for SV(C|O) and mtDNA
attgttgtttggaagggggatgcgggggaaatgttgttagtaatgagaaatcctgcgaataggcttccggctgtcaggcgtttaatggggtttagtagggtggggttattttcgttaatg

SEQ ID NO: 82166 - DNA, 120 bp, Homo sapiens
  misc_feature: 413 for SV(C|O) and mtDNA
caccattggcagcctagcattagcaggaatacctttcctcacaggtttctactccaaagaccacatcatcgaaaccgcaaacatatcatacacaaacgcctgagccctatctattactct

SEQ ID NO: 82167 - DNA, 120 bp, Homo sapiens
  misc_feature: 413 for SV(C|O) and mtDNA
atctctcccagtcctagctgctggcatcactatactactaacagaccgcaacctcaacaccaccttcttcgaccccgccggaggaggagaccccattctataccaacacctattctgatt

SEQ ID NO: 82168 - DNA, 120 bp, Homo sapiens
  misc_feature: 412 for SV(C|O) and mtDNA
cacatgacaaaaactagcccccatctcaatcatataccaaatctctccctcactaaacgtaagccttctcctcactctctcaatcttatccatcatagcaggcagttgaggtggattaaa

SEQ ID NO: 82169 - DNA, 120 bp, Homo sapiens; identical to SEQ ID NO: 60157
  misc_feature: 412 for SV(C|O) and mtDNA

SEQ ID NO: 82170 - DNA, 120 bp, Homo sapiens
  misc_feature: 412 for SV(C|O) and mtDNA
tgagtagtaggaatgcggtagtagttaggataatataaatagttaaattaagaatggttatgttagggttgtacggtagaactgctattattcatcctatgtgggtaattgaggagtatg

SEQ ID NO: 82171 - DNA, 120 bp, Homo sapiens; identical to SEQ ID NO: 61715
  misc_feature: 412 for SV(C|O) and mtDNA

SEQ ID NO: 82172 - DNA, 120 bp, Homo sapiens
  misc_feature: 412 for SV(C|O) and mtDNA
tcctacactccaactcatgagacccacaacaaatagcccttctaaacgctaatccaagcctcaccccactactaggcctcctcctagcagcagcaggcaaatcagcccaattaggtctcc

SEQ ID NO: 82173 - DNA, 120 bp, Homo sapiens
  misc_feature: 412 for SV(C|O) and mtDNA
tatctctcccagtcctagctgctggcatcactatactactaacagaccgcaacctcaacaccaccttcttcgaccccgccggaggaggagaccccattctataccaacacctattctgat

SEQ ID NO: 82174 - DNA, 120 bp, Homo sapiens
  misc_feature: 412 for SV(C|O) and mtDNA
cttctcctatctctcccagtcctagctgctggcatcactatactactaacagaccgcaacctcaacaccaccttcttcgaccccgccggaggaggagaccccattctataccaacaccta

SEQ ID NO: 82175 - DNA, 120 bp, Homo sapiens
  misc_feature: 412 for SV(C|O) and mtDNA
aacgttgtaggcccctacgggctactacaacccttcgctgacgccataaaactcttcaccaaagagcccctaaaacccgccacatctaccatcaccctctacatcaccgccccgacctta

SEQ ID NO: 82176 - DNA, 120 bp, Homo sapiens
  misc_feature: 412 for SV(C|O) and mtDNA
cccaacgttgtaggcccctacgggctactacaacccttcgctgacgccataaaactcttcaccaaagagcccctaaaacccgccacatctaccatcaccctctacatcaccgccccgacc

SEQ ID NO: 82177 - DNA, 120 bp, Homo sapiens; identical to SEQ ID NO: 62217
  misc_feature: 412 for SV(C|O) and mtDNA

SEQ ID NO: 82178 - DNA, 120 bp, Homo sapiens
  misc_feature: 412 for SV(C|O) and mtDNA
cttagttaaactttcgtttattgctaaaggttaatcactgctgtttcccgtgggggtgtggctaggctaagcgttttgagctgcattgctgcgtgcttgatgcttgtcccttttgatcgt

SEQ ID NO: 82179 - DNA, 120 bp, Homo sapiens
  misc_feature: 412 for SV(C|O) and mtDNA
aacctatttgtttatggggtgatgtgagcccgtctaaacattttcagtgtattgctttgaggaggtaagctacataaactgtggggggtgtctttggggtttggttggttcggggtatgg

SEQ ID NO: 82180 - DNA, 120 bp, Homo sapiens; identical to SEQ ID NO: 57915
  misc_feature: 412 for SV(C|O) and mtDNA

SEQ ID NO: 82181 - DNA, 120 bp, Homo sapiens
  misc_feature: 412 for SV(C|O) and mtDNA
caacgttgtaggcccctacgggctactacaacccttcgctgacgccataaaactcttcaccaaagagcccctaaaacccgccacatctaccatcaccctctacatcaccgccccgacctt

SEQ ID NO: 82182 - DNA, 120 bp, Homo sapiens
  misc_feature: 411 for SV(C|O) and mtDNA
ttgtgttgtgataagggtggagaggttaaaggagccacttattagtaatgttgatagtagaatgatggctagggtgacttcatatgagattgtttgggctactgctcgcagtgcgccgat

SEQ ID NO: 82183 - DNA, 120 bp, Homo sapiens
  misc_feature: 411 for SV(C|O) and mtDNA
tcttgtgttgtgataagggtggagaggttaaaggagccacttattagtaatgttgatagtagaatgatggctagggtgacttcatatgagattgtttgggctactgctcgcagtgcgccg

SEQ ID NO: 82184 - DNA, 120 bp, Homo sapiens
  misc_feature: 411 for SV(C|O) and mtDNA
actggggtggggccttctatggctgaggggagtcaggggtggagacctaattgggctgatttgcctgctgctgctaggaggaggcctagtagtggggtgaggcttggattagcgtttaga

SEQ ID NO: 82185 - DNA, 120 bp, Homo sapiens; identical to SEQ ID NO: 62059
  misc_feature: 411 for SV(C|O) and mtDNA

SEQ ID NO: 82186 - DNA, 120 bp, Homo sapiens
  misc_feature: 411 for SV(C|O) and mtDNA
gttttatattgataattgttgtgatgaagttgatggcccctaagatagaggagacacctgctaggtgtaaggagaagatggttaggtctacggaggctccagggtgggagtagttccctg

SEQ ID NO: 82187 - DNA, 120 bp, Homo sapiens
  misc_feature: 411 for SV(C|O) and mtDNA
aggccccaacgttgtaggcccctacgggctactacaacccttcgctgacgccataaaactcttcaccaaagagcccctaaaacccgccacatctaccatcaccctctacatcaccgcccc

SEQ ID NO: 82188 - DNA, 120 bp, Homo sapiens
  misc_feature: 411 for SV(C|O) and mtDNA
ctcctatctctcccagtcctagctgctggcatcactatactactaacagaccgcaacctcaacaccaccttcttcgaccccgccggaggaggagaccccattctataccaacacctattc

SEQ ID NO: 82189 - DNA, 120 bp, Homo sapiens
  misc_feature: 411 for SV(C|O) and mtDNA
agtaggaatgcggtagtagttaggataatataaatagttaaattaagaatggttatgttagggttgtacggtagaactgctattattcatcctatgtgggtaattgaggagtatgctaag

SEQ ID NO: 82190 - DNA, 120 bp, Homo sapiens; identical to SEQ ID NO: 62055
  misc_feature: 411 for SV(C|O) and mtDNA

SEQ ID NO: 82191 - DNA, 120 bp, Homo sapiens; identical to SEQ ID NO: 60676
  misc_feature: 411 for SV(C|O) and mtDNA

SEQ ID NO: 82192 - DNA, 120 bp, Homo sapiens; identical to SEQ ID NO: 61229
  misc_feature: 411 for SV(C|O) and mtDNA

SEQ ID NO: 82193 - DNA, 120 bp, Homo sapiens
  misc_feature: 411 for SV(C|O) and mtDNA
aaacctatttgtttatggggtgatgtgagcccgtctaaacattttcagtgtattgctttgaggaggtaagctacataaactgtggggggtgtctttggggtttggttggttcggggtatg

SEQ ID NO: 82194 - DNA, 120 bp, Homo sapiens
  misc_feature: 411 for SV(C|O) and mtDNA
agtagtaggaatgcggtagtagttaggataatataaatagttaaattaagaatggttatgttagggttgtacggtagaactgctattattcatcctatgtgggtaattgaggagtatgct

SEQ ID NO: 82195 - DNA, 120 bp, Homo sapiens
  misc_feature: 411 for SV(C|O) and mtDNA
aaagtaaaaggaactcggcaaatcttaccccgcctgtttaccaaaaacatcacctctagcatcaccagtattagaggcaccgcctgcccagtgacacatgtttaacggccgcggtaccct

SEQ ID NO: 82196 - DNA, 120 bp, Homo sapiens
  misc_feature: 410 for SV(C|O) and mtDNA
ctggggtggggccttctatggctgaggggagtcaggggtggagacctaattgggctgatttgcctgctgctgctaggaggaggcctagtagtggggtgaggcttggattagcgtttagaa

SEQ ID NO: 82197 - DNA, 120 bp, Homo sapiens
  misc_feature: 410 for SV(C|O) and mtDNA
tctcctatctctcccagtcctagctgctggcatcactatactactaacagaccgcaacctcaacaccaccttcttcgaccccgccggaggaggagaccccattctataccaacacctatt

SEQ ID NO: 82198 - DNA, 120 bp, Homo sapiens
  misc_feature: 410 for SV(C|O) and mtDNA
gtagtaggaatgcggtagtagttaggataatataaatagttaaattaagaatggttatgttagggttgtacggtagaactgctattattcatcctatgtgggtaattgaggagtatgcta

SEQ ID NO: 82199 - DNA, 120 bp, Homo sapiens
  misc_feature: 410 for SV(C|O) and mtDNA
ctcacatgacaaaaactagcccccatctcaatcatataccaaatctctccctcactaaacgtaagccttctcctcactctctcaatcttatccatcatagcaggcagttgaggtggatta

SEQ ID NO: 82200 - DNA, 120 bp, Homo sapiens
  misc_feature: 410 for SV(C|O) and mtDNA
gggtggggccttctatggctgaggggagtcaggggtggagacctaattgggctgatttgcctgctgctgctaggaggaggcctagtagtggggtgaggcttggattagcgtttagaaggg

SEQ ID NO: 82201 - DNA, 120 bp, Homo sapiens
  misc_feature: 410 for SV(C|O) and mtDNA
gcttagttaaactttcgtttattgctaaaggttaatcactgctgtttcccgtgggggtgtggctaggctaagcgttttgagctgcattgctgcgtgcttgatgcttgtcccttttgatcg

SEQ ID NO: 82202 - DNA, 120 bp, Homo sapiens
  misc_feature: 409 for SV(C|O) and mtDNA
gtaggaatgcggtagtagttaggataatataaatagttaaattaagaatggttatgttagggttgtacggtagaactgctattattcatcctatgtgggtaattgaggagtatgctaaga

SEQ ID NO: 82203 - DNA, 120 bp, Homo sapiens; identical to SEQ ID NO: 57486
  misc_feature: 409 for SV(C|O) and mtDNA

SEQ ID NO: 82204 - DNA, 120 bp, Homo sapiens
  misc_feature: 409 for SV(C|O) and mtDNA
tacgccgcaggccccttcgccttattcttcatagccgaatacacaaacattattataataaacaccctcaccactacaatcttcctaggaacaacatatgacgcactctcccctgaactc

SEQ ID NO: 82205 - DNA, 120 bp, Homo sapiens
  misc_feature: 409 for SV(C|O) and mtDNA
cctcaccattggcagcctagcattagcaggaatacctttcctcacaggtttctactccaaagaccacatcatcgaaaccgcaaacatatcatacacaaacgcctgagccctatctattac

SEQ ID NO: 82206 - DNA, 120 bp, Homo sapiens
  misc_feature: 409 for SV(C|O) and mtDNA
aaaagtaaaaggaactcggcaaatcttaccccgcctgtttaccaaaaacatcacctctagcatcaccagtattagaggcaccgcctgcccagtgacacatgtttaacggccgcggtaccc

SEQ ID NO: 82207 - DNA, 120 bp, Homo sapiens
  misc_feature: 409 for SV(C|O) and mtDNA
gaatgcggtagtagttaggataatataaatagttaaattaagaatggttatgttagggttgtacggtagaactgctattattcatcctatgtgggtaattgaggagtatgctaagatttt

SEQ ID NO: 82208 - DNA, 120 bp, Homo sapiens
  misc_feature: 408 for SV(C|O) and mtDNA
tggggtggggccttctatggctgaggggagtcaggggtggagacctaattgggctgatttgcctgctgctgctaggaggaggcctagtagtggggtgaggcttggattagcgtttagaag

SEQ ID NO: 82209 - DNA, 120 bp, Homo sapiens; identical to SEQ ID NO: 59602
  misc_feature: 408 for SV(C|O) and mtDNA

SEQ ID NO: 82210 - DNA, 120 bp, Homo sapiens
  misc_feature: 408 for SV(C|O) and mtDNA
tcctatctctcccagtcctagctgctggcatcactatactactaacagaccgcaacctcaacaccaccttcttcgaccccgccggaggaggagaccccattctataccaacacctattct

SEQ ID NO: 82211 - DNA, 120 bp, Homo sapiens
  misc_feature: 408 for SV(C|O) and mtDNA
ctatctctcccagtcctagctgctggcatcactatactactaacagaccgcaacctcaacaccaccttcttcgaccccgccggaggaggagaccccattctataccaacacctattctga

SEQ ID NO: 82212 - DNA, 120 bp, Homo sapiens
  misc_feature: 408 for SV(C|O) and mtDNA
tatcctacactccaactcatgagacccacaacaaatagcccttctaaacgctaatccaagcctcaccccactactaggcctcctcctagcagcagcaggcaaatcagcccaattaggtct

SEQ ID NO: 82213 - DNA, 120 bp, Homo sapiens
  misc_feature: 408 for SV(C|O) and mtDNA
atgcggtagtagttaggataatataaatagttaaattaagaatggttatgttagggttgtacggtagaactgctattattcatcctatgtgggtaattgaggagtatgctaagattttgc

SEQ ID NO: 82214 - DNA, 120 bp, Homo sapiens
  misc_feature: 408 for SV(C|O) and mtDNA
agcttagttaaactttcgtttattgctaaaggttaatcactgctgtttcccgtgggggtgtggctaggctaagcgttttgagctgcattgctgcgtgcttgatgcttgtcccttttgatc

SEQ ID NO: 82215 - DNA, 120 bp, Homo sapiens
  misc_feature: 407 for SV(C|O) and mtDNA
ttcttgtgttgtgataagggtggagaggttaaaggagccacttattagtaatgttgatagtagaatgatggctagggtgacttcatatgagattgtttgggctactgctcgcagtgcgcc

SEQ ID NO: 82216 - DNA, 120 bp, Homo sapiens
  misc_feature: 407 for SV(C|O) and mtDNA
caacaaatagcccttctaaacgctaatccaagcctcaccccactactaggcctcctcctagcagcagcaggcaaatcagcccaattaggtctccacccctgactcccctcagccatagaa

SEQ ID NO: 82217 - DNA, 120 bp, Homo sapiens
  misc_feature: 407 for SV(C|O) and mtDNA
tagtaggaatgcggtagtagttaggataatataaatagttaaattaagaatggttatgttagggttgtacggtagaactgctattattcatcctatgtgggtaattgaggagtatgctaa

SEQ ID NO: 82218 - DNA, 120 bp, Homo sapiens
  misc_feature: 407 for SV(C|O) and mtDNA
tcacatgacaaaaactagcccccatctcaatcatataccaaatctctccctcactaaacgtaagccttctcctcactctctcaatcttatccatcatagcaggcagttgaggtggattaa

SEQ ID NO: 82219 - DNA, 120 bp, Homo sapiens
  misc_feature: 407 for SV(C|O) and mtDNA
gaactagtctcaggcttcaacatcgaatacgccgcaggccccttcgccttattcttcatagccgaatacacaaacattattataataaacaccctcaccactacaatcttcctaggaaca

SEQ ID NO: 82220 - DNA, 120 bp, Homo sapiens
  misc_feature: 407 for SV(C|O) and mtDNA
cgaatacgccgcaggccccttcgccttattcttcatagccgaatacacaaacattattataataaacaccctcaccactacaatcttcctaggaacaacatatgacgcactctcccctga

SEQ ID NO: 82221 - DNA, 120 bp, Homo sapiens
  misc_feature: 407 for SV(C|O) and mtDNA
ccctcaccattggcagcctagcattagcaggaatacctttcctcacaggtttctactccaaagaccacatcatcgaaaccgcaaacatatcatacacaaacgcctgagccctatctatta

SEQ ID NO: 82222 - DNA, 120 bp, Homo sapiens
  misc_feature: 407 for SV(C|O) and mtDNA
cctatctctcccagtcctagctgctggcatcactatactactaacagaccgcaacctcaacaccaccttcttcgaccccgccggaggaggagaccccattctataccaacacctattctg

SEQ ID NO: 82223 - DNA, 120 bp, Homo sapiens; identical to SEQ ID NO: 58469
  misc_feature: 407 for SV(C|O) and mtDNA

SEQ ID NO: 82224 - DNA, 120 bp, Homo sapiens
  misc_feature: 406 for SV(C|O) and mtDNA
tgtgttgtgataagggtggagaggttaaaggagccacttattagtaatgttgatagtagaatgatggctagggtgacttcatatgagattgtttgggctactgctcgcagtgcgccgatc

SEQ ID NO: 82225 - DNA, 120 bp, Homo sapiens
  misc_feature: 406 for SV(C|O) and mtDNA
ccgcaggccccttcgccttattcttcatagccgaatacacaaacattattataataaacaccctcaccactacaatcttcctaggaacaacatatgacgcactctcccctgaactctaca

SEQ ID NO: 82226 - DNA, 120 bp, Homo sapiens
  misc_feature: 406 for SV(C|O) and mtDNA
cttgtgttgtgataagggtggagaggttaaaggagccacttattagtaatgttgatagtagaatgatggctagggtgacttcatatgagattgtttgggctactgctcgcagtgcgccga

SEQ ID NO: 82227 - DNA, 120 bp, Homo sapiens
  misc_feature: 406 for SV(C|O) and mtDNA
ggaatgcggtagtagttaggataatataaatagttaaattaagaatggttatgttagggttgtacggtagaactgctattattcatcctatgtgggtaattgaggagtatgctaagattt

SEQ ID NO: 82228 - DNA, 120 bp, Homo sapiens
  misc_feature: 406 for SV(C|O) and mtDNA
aaaaataaaaaattataacaaaccctgagaaccaaaatgaacgaaaatctgttcgcttcattcattgcccccacaatcctaggcctacccgccgcagtactgatcattctatttccccct

SEQ ID NO: 82229 - DNA, 120 bp, Homo sapiens; identical to SEQ ID NO: 60090
  misc_feature: 405 for SV(C|O) and mtDNA

SEQ ID NO: 82230 - DNA, 120 bp, Homo sapiens
  misc_feature: 405 for SV(C|O) and mtDNA
tagcttagttaaactttcgtttattgctaaaggttaatcactgctgtttcccgtgggggtgtggctaggctaagcgttttgagctgcattgctgcgtgcttgatgcttgtcccttttgat

SEQ ID NO: 82231 - DNA, 120 bp, Homo sapiens; identical to SEQ ID NO: 61951
  misc_feature: 405 for SV(C|O) and mtDNA

SEQ ID NO: 82232 - DNA, 120 bp, Homo sapiens; identical to SEQ ID NO: 59665
  misc_feature: 405 for SV(C|O) and mtDNA

SEQ ID NO: 82233 - DNA, 120 bp, Homo sapiens; identical to SEQ ID NO: 61703
  misc_feature: 405 for SV(C|O) and mtDNA

SEQ ID NO: 82234 - DNA, 120 bp, Homo sapiens
  misc_feature: 405 for SV(C|O) and mtDNA
cacccctctgacatccggcctgcttcttctcacatgacaaaaactagcccccatctcaatcatataccaaatctctccctcactaaacgtaagccttctcctcactctctcaatcttatc

SEQ ID NO: 82235 - DNA, 120 bp, Homo sapiens
  misc_feature: 405 for SV(C|O) and mtDNA
caaacctatttgtttatggggtgatgtgagcccgtctaaacattttcagtgtattgctttgaggaggtaagctacataaactgtggggggtgtctttggggtttggttggttcggggtat

SEQ ID NO: 82236 - DNA, 120 bp, Homo sapiens
  misc_feature: 405 for SV(C|O) and mtDNA
aatgcggtagtagttaggataatataaatagttaaattaagaatggttatgttagggttgtacggtagaactgctattattcatcctatgtgggtaattgaggagtatgctaagattttg

SEQ ID NO: 82237 - DNA, 120 bp, Homo sapiens
  misc_feature: 404 for SV(C|O) and mtDNA
aactagtctcaggcttcaacatcgaatacgccgcaggccccttcgccttattcttcatagccgaatacacaaacattattataataaacaccctcaccactacaatcttcctaggaacaa

SEQ ID NO: 82238 - DNA, 120 bp, Homo sapiens
  misc_feature: 404 for SV(C|O) and mtDNA
ttaaaaaaagtaaaaggaactcggcaaatcttaccccgcctgtttaccaaaaacatcacctctagcatcaccagtattagaggcaccgcctgcccagtgacacatgtttaacggccgcgg

SEQ ID NO: 82239 - DNA, 120 bp, Homo sapiens
  misc_feature: 404 for SV(C|O) and mtDNA
cctacactccaactcatgagacccacaacaaatagcccttctaaacgctaatccaagcctcaccccactactaggcctcctcctagcagcagcaggcaaatcagcccaattaggtctcca

SEQ ID NO: 82240 - DNA, 120 bp, Homo sapiens
  misc_feature: 404 for SV(C|O) and mtDNA
gccccaacgttgtaggcccctacgggctactacaacccttcgctgacgccataaaactcttcaccaaagagcccctaaaacccgccacatctaccatcaccctctacatcaccgccccga

SEQ ID NO: 82241 - DNA, 120 bp, Homo sapiens
  misc_feature: 404 for SV(C|O) and mtDNA
ggaggcctagtagtggggtgaggcttggattagcgtttagaagggctatttgttgtgggtctcatgagttggagtgtaggataaatcatgctaaggcgaggatgaaaccgatatcgccga

SEQ ID NO: 82242 - DNA, 120 bp, Homo sapiens
  misc_feature: 404 for SV(C|O) and mtDNA
ccccaacgttgtaggcccctacgggctactacaacccttcgctgacgccataaaactcttcaccaaagagcccctaaaacccgccacatctaccatcaccctctacatcaccgccccgac

SEQ ID NO: 82243 - DNA, 120 bp, Homo sapiens
  misc_feature: 404 for SV(C|O) and mtDNA
ctcatgagacccacaacaaatagcccttctaaacgctaatccaagcctcaccccactactaggcctcctcctagcagcagcaggcaaatcagcccaattaggtctccacccctgactccc

SEQ ID NO: 82244 - DNA, 120 bp, Homo sapiens
  misc_feature: 403 for SV(C|O) and mtDNA
ttgacttgggttaatcgtgtgaccgcggtggctggcacgaaattgaccaaccctggggttagtatagcttagttaaactttcgtttattgctaaaggttaatcactgctgtttcccgtgg

SEQ ID NO: 82245 - DNA, 120 bp, Homo sapiens
  misc_feature: 403 for SV(C|O) and mtDNA
tgcggtagtagttaggataatataaatagttaaattaagaatggttatgttagggttgtacggtagaactgctattattcatcctatgtgggtaattgaggagtatgctaagattttgcg

SEQ ID NO: 82246 - DNA, 120 bp, Homo sapiens
  misc_feature: 403 for SV(C|O) and mtDNA
ctacactccaactcatgagacccacaacaaatagcccttctaaacgctaatccaagcctcaccccactactaggcctcctcctagcagcagcaggcaaatcagcccaattaggtctccac

SEQ ID NO: 82247 - DNA, 120 bp, Homo sapiens
  misc_feature: 403 for SV(C|O) and mtDNA
gacccacaacaaatagcccttctaaacgctaatccaagcctcaccccactactaggcctcctcctagcagcagcaggcaaatcagcccaattaggtctccacccctgactcccctcagcc

SEQ ID NO: 82248 - DNA, 120 bp, Homo sapiens
  misc_feature: 403 for SV(C|O) and mtDNA
atgagacccacaacaaatagcccttctaaacgctaatccaagcctcaccccactactaggcctcctcctagcagcagcaggcaaatcagcccaattaggtctccacccctgactcccctc

SEQ ID NO: 82249 - DNA, 120 bp, Homo sapiens; identical to SEQ ID NO: 58972
  misc_feature: 403 for SV(C|O) and mtDNA

SEQ ID NO: 82250 - DNA, 120 bp, Homo sapiens
  misc_feature: 403 for SV(C|O) and mtDNA
acgccgcaggccccttcgccttattcttcatagccgaatacacaaacattattataataaacaccctcaccactacaatcttcctaggaacaacatatgacgcactctcccctgaactct

SEQ ID NO: 82251 - DNA, 120 bp, Homo sapiens; identical to SEQ ID NO: 58735
  misc_feature: 402 for SV(C|O) and mtDNA

SEQ ID NO: 82252 - DNA, 120 bp, Homo sapiens
  misc_feature: 402 for SV(C|O) and mtDNA
aactaccacctacctccctcaccaaagcccataaaaataaaaaattataacaaaccctgagaaccaaaatgaacgaaaatctgttcgcttcattcattgcccccacaatcctaggcctac

SEQ ID NO: 82253 - DNA, 120 bp, Homo sapiens
  misc_feature: 402 for SV(C|O) and mtDNA
gggttttatattgataattgttgtgatgaagttgatggcccctaagatagaggagacacctgctaggtgtaaggagaagatggttaggtctacggaggctccagggtgggagtagttccc

SEQ ID NO: 82254 - DNA, 120 bp, Homo sapiens
  misc_feature: 402 for SV(C|O) and mtDNA
actcatgagacccacaacaaatagcccttctaaacgctaatccaagcctcaccccactactaggcctcctcctagcagcagcaggcaaatcagcccaattaggtctccacccctgactcc

SEQ ID NO: 82255 - DNA, 120 bp, Homo sapiens; identical to SEQ ID NO: 60560
  misc_feature: 401 for SV(C|O) and mtDNA

SEQ ID NO: 82256 - DNA, 120 bp, Homo sapiens
  misc_feature: 401 for SV(C|O) and mtDNA
gtgttgtgataagggtggagaggttaaaggagccacttattagtaatgttgatagtagaatgatggctagggtgacttcatatgagattgtttgggctactgctcgcagtgcgccgatca

SEQ ID NO: 82257 - DNA, 120 bp, Homo sapiens
  misc_feature: 401 for SV(C|O) and mtDNA
tgacttgggttaatcgtgtgaccgcggtggctggcacgaaattgaccaaccctggggttagtatagcttagttaaactttcgtttattgctaaaggttaatcactgctgtttcccgtggg

SEQ ID NO: 82258 - DNA, 120 bp, Homo sapiens
  misc_feature: 401 for SV(C|O) and mtDNA
tcgaatacgccgcaggccccttcgccttattcttcatagccgaatacacaaacattattataataaacaccctcaccactacaatcttcctaggaacaacatatgacgcactctcccctg

SEQ ID NO: 82259 - DNA, 120 bp, Homo sapiens
  misc_feature: 401 for SV(C|O) and mtDNA
actaccacctacctccctcaccaaagcccataaaaataaaaaattataacaaaccctgagaaccaaaatgaacgaaaatctgttcgcttcattcattgcccccacaatcctaggcctacc

SEQ ID NO: 82260 - DNA, 120 bp, Homo sapiens
  misc_feature: 401 for SV(C|O) and mtDNA
agacccacaacaaatagcccttctaaacgctaatccaagcctcaccccactactaggcctcctcctagcagcagcaggcaaatcagcccaattaggtctccacccctgactcccctcagc

SEQ ID NO: 82261 - DNA, 120 bp, Homo sapiens; identical to SEQ ID NO: 60970
  misc_feature: 401 for SV(C|O) and mtDNA

SEQ ID NO: 82262 - DNA, 120 bp, Homo sapiens; identical to SEQ ID NO: 58707
  misc_feature: 400 for SV(C|O) and mtDNA

SEQ ID NO: 82263 - DNA, 120 bp, Homo sapiens
  misc_feature: 400 for SV(C|O) and mtDNA
acaacaaatagcccttctaaacgctaatccaagcctcaccccactactaggcctcctcctagcagcagcaggcaaatcagcccaattaggtctccacccctgactcccctcagccataga

SEQ ID NO: 82264 - DNA, 120 bp, Homo sapiens
  misc_feature: 400 for SV(C|O) and mtDNA
ccacaacaaatagcccttctaaacgctaatccaagcctcaccccactactaggcctcctcctagcagcagcaggcaaatcagcccaattaggtctccacccctgactcccctcagccata

SEQ ID NO: 82265 - DNA, 120 bp, Homo sapiens
  misc_feature: 400 for SV(C|O) and mtDNA
taaaaataaaaaattataacaaaccctgagaaccaaaatgaacgaaaatctgttcgcttcattcattgcccccacaatcctaggcctacccgccgcagtactgatcattctatttccccc

SEQ ID NO: 82266 - DNA, 120 bp, Homo sapiens
  misc_feature: 400 for SV(C|O) and mtDNA
agagtccgaactagtctcaggcttcaacatcgaatacgccgcaggccccttcgccttattcttcatagccgaatacacaaacattattataataaacaccctcaccactacaatcttcct

SEQ ID NO: 82267 - DNA, 120 bp, Homo sapiens
  misc_feature: 400 for SV(C|O) and mtDNA
aacacatctctgccaaaccccaaaaacaaagaaccctaacaccagcctaaccagatttcaaattttatcttttggcggtatgcacttttaacagtcaccccccaactaacacattatttt

SEQ ID NO: 82268 - DNA, 120 bp, Homo sapiens
  misc_feature: 399 for SV(C|O) and mtDNA
tgagacccacaacaaatagcccttctaaacgctaatccaagcctcaccccactactaggcctcctcctagcagcagcaggcaaatcagcccaattaggtctccacccctgactcccctca

SEQ ID NO: 82269 - DNA, 120 bp, Homo sapiens
  misc_feature: 399 for SV(C|O) and mtDNA
aaaaagtaaaaggaactcggcaaatcttaccccgcctgtttaccaaaaacatcacctctagcatcaccagtattagaggcaccgcctgcccagtgacacatgtttaacggccgcggtacc

SEQ ID NO: 82270 - DNA, 120 bp, Homo sapiens
  misc_feature: 399 for SV(C|O) and mtDNA
gagacccacaacaaatagcccttctaaacgctaatccaagcctcaccccactactaggcctcctcctagcagcagcaggcaaatcagcccaattaggtctccacccctgactcccctcag

SEQ ID NO: 82271 - DNA, 120 bp, Homo sapiens
  misc_feature: 399 for SV(C|O) and mtDNA
gacttgggttaatcgtgtgaccgcggtggctggcacgaaattgaccaaccctggggttagtatagcttagttaaactttcgtttattgctaaaggttaatcactgctgtttcccgtgggg

SEQ ID NO: 82272 - DNA, 120 bp, Homo sapiens
  misc_feature: 398 for SV(C|O) and mtDNA
atagcttagttaaactttcgtttattgctaaaggttaatcactgctgtttcccgtgggggtgtggctaggctaagcgttttgagctgcattgctgcgtgcttgatgcttgtcccttttga

SEQ ID NO: 82273 - DNA, 120 bp, Homo sapiens
  misc_feature: 398 for SV(C|O) and mtDNA
aaccgtatcggcgatatcggtttcatcctcgccttagcatgatttatcctacactccaactcatgagacccacaacaaatagcccttctaaacgctaatccaagcctcaccccactacta

SEQ ID NO: 82274 - DNA, 120 bp, Homo sapiens; identical to SEQ ID NO: 60949
  misc_feature: 398 for SV(C|O) and mtDNA

SEQ ID NO: 82275 - DNA, 120 bp, Homo sapiens
  misc_feature: 398 for SV(C|O) and mtDNA
gcggtagtagttaggataatataaatagttaaattaagaatggttatgttagggttgtacggtagaactgctattattcatcctatgtgggtaattgaggagtatgctaagattttgcgt

SEQ ID NO: 82276 - DNA, 120 bp, Homo sapiens; identical to SEQ ID NO: 59566
  misc_feature: 398 for SV(C|O) and mtDNA

SEQ ID NO: 82277 - DNA, 120 bp, Homo sapiens; identical to SEQ ID NO: 57956
  misc_feature: 398 for SV(C|O) and mtDNA

SEQ ID NO: 82278 - DNA, 120 bp, Homo sapiens
  misc_feature: 398 for SV(C|O) and mtDNA
aaacacatctctgccaaaccccaaaaacaaagaaccctaacaccagcctaaccagatttcaaattttatcttttggcggtatgcacttttaacagtcaccccccaactaacacattattt

SEQ ID NO: 82279 - DNA, 120 bp, Homo sapiens; identical to SEQ ID NO: 60314
  misc_feature: 397 for SV(C|O) and mtDNA

SEQ ID NO: 82280 - DNA, 120 bp, Homo sapiens
  misc_feature: 397 for SV(C|O) and mtDNA
gaacggggatgcttgcatgtgtaatcttactaagagctaatagaaaggctaggaccaaacctatttgtttatggggtgatgtgagcccgtctaaacattttcagtgtattgctttgagga

SEQ ID NO: 82281 - DNA, 120 bp, Homo sapiens
  misc_feature: 397 for SV(C|O) and mtDNA
taaaaaaagtaaaaggaactcggcaaatcttaccccgcctgtttaccaaaaacatcacctctagcatcaccagtattagaggcaccgcctgcccagtgacacatgtttaacggccgcggt

SEQ ID NO: 82282 - DNA, 120 bp, Homo sapiens
  misc_feature: 397 for SV(C|O) and mtDNA
ccaactcatgagacccacaacaaatagcccttctaaacgctaatccaagcctcaccccactactaggcctcctcctagcagcagcaggcaaatcagcccaattaggtctccacccctgac

SEQ ID NO: 82283 - DNA, 120 bp, Homo sapiens
  misc_feature: 397 for SV(C|O) and mtDNA
acaaccgtatcggcgatatcggtttcatcctcgccttagcatgatttatcctacactccaactcatgagacccacaacaaatagcccttctaaacgctaatccaagcctcaccccactac

SEQ ID NO: 82284 - DNA, 120 bp, Homo sapiens
  misc_feature: 397 for SV(C|O) and mtDNA
acccctctgacatccggcctgcttcttctcacatgacaaaaactagcccccatctcaatcatataccaaatctctccctcactaaacgtaagccttctcctcactctctcaatcttatcc

SEQ ID NO: 82285 - DNA, 120 bp, Homo sapiens
  misc_feature: 397 for SV(C|O) and mtDNA
acgttgtaggcccctacgggctactacaacccttcgctgacgccataaaactcttcaccaaagagcccctaaaacccgccacatctaccatcaccctctacatcaccgccccgaccttag

SEQ ID NO: 82286 - DNA, 120 bp, Homo sapiens; identical to SEQ ID NO: 58874
  misc_feature: 397 for SV(C|O) and mtDNA

SEQ ID NO: 82287 - DNA, 120 bp, Homo sapiens; identical to SEQ ID NO: 60752
  misc_feature: 396 for SV(C|O) and mtDNA

SEQ ID NO: 82288 - DNA, 120 bp, Homo sapiens
  misc_feature: 396 for SV(C|O) and mtDNA
aggcctagtagtggggtgaggcttggattagcgtttagaagggctatttgttgtgggtctcatgagttggagtgtaggataaatcatgctaaggcgaggatgaaaccgatatcgccgata

SEQ ID NO: 82289 - DNA, 120 bp, Homo sapiens
  misc_feature: 396 for SV(C|O) and mtDNA
tatagcttagttaaactttcgtttattgctaaaggttaatcactgctgtttcccgtgggggtgtggctaggctaagcgttttgagctgcattgctgcgtgcttgatgcttgtcccttttg

SEQ ID NO: 82290 - DNA, 120 bp, Homo sapiens
  misc_feature: 396 for SV(C|O) and mtDNA
tacactccaactcatgagacccacaacaaatagcccttctaaacgctaatccaagcctcaccccactactaggcctcctcctagcagcagcaggcaaatcagcccaattaggtctccacc

SEQ ID NO: 82291 - DNA, 120 bp, Homo sapiens; identical to SEQ ID NO: 62198
  misc_feature: 396 for SV(C|O) and mtDNA

SEQ ID NO: 82292 - DNA, 120 bp, Homo sapiens
  misc_feature: 396 for SV(C|O) and mtDNA
ggcctagtagtggggtgaggcttggattagcgtttagaagggctatttgttgtgggtctcatgagttggagtgtaggataaatcatgctaaggcgaggatgaaaccgatatcgccgatac

SEQ ID NO: 82293 - DNA, 120 bp, Homo sapiens
  misc_feature: 396 for SV(C|O) and mtDNA
gccgcaggccccttcgccttattcttcatagccgaatacacaaacattattataataaacaccctcaccactacaatcttcctaggaacaacatatgacgcactctcccctgaactctac

SEQ ID NO: 82294 - DNA, 120 bp, Homo sapiens
  misc_feature: 396 for SV(C|O) and mtDNA
aactcatgagacccacaacaaatagcccttctaaacgctaatccaagcctcaccccactactaggcctcctcctagcagcagcaggcaaatcagcccaattaggtctccacccctgactc

SEQ ID NO: 82295 - DNA, 120 bp, Homo sapiens
  misc_feature: 396 for SV(C|O) and mtDNA
actccaactcatgagacccacaacaaatagcccttctaaacgctaatccaagcctcaccccactactaggcctcctcctagcagcagcaggcaaatcagcccaattaggtctccacccct

SEQ ID NO: 82296 - DNA, 120 bp, Homo sapiens
  misc_feature: 395 for SV(C|O) and mtDNA
ttgtaggcccctacgggctactacaacccttcgctgacgccataaaactcttcaccaaagagcccctaaaacccgccacatctaccatcaccctctacatcaccgccccgaccttagctc

SEQ ID NO: 82297 - DNA, 120 bp, Homo sapiens
  misc_feature: 395 for SV(C|O) and mtDNA
tgtttatggggtgatgtgagcccgtctaaacattttcagtgtattgctttgaggaggtaagctacataaactgtggggggtgtctttggggtttggttggttcggggtatggggttagca

SEQ ID NO: 82298 - DNA, 120 bp, Homo sapiens; identical to SEQ ID NO: 62017
  misc_feature: 395 for SV(C|O) and mtDNA

SEQ ID NO: 82299 - DNA, 120 bp, Homo sapiens; identical to SEQ ID NO: 60569
  misc_feature: 395 for SV(C|O) and mtDNA

SEQ ID NO: 82300 - DNA, 120 bp, Homo sapiens
  misc_feature: 395 for SV(C|O) and mtDNA
gttaaaaaaagtaaaaggaactcggcaaatcttaccccgcctgtttaccaaaaacatcacctctagcatcaccagtattagaggcaccgcctgcccagtgacacatgtttaacggccgcg

SEQ ID NO: 82301 - DNA, 120 bp, Homo sapiens
  misc_feature: 395 for SV(C|O) and mtDNA
gaggcctagtagtggggtgaggcttggattagcgtttagaagggctatttgttgtgggtctcatgagttggagtgtaggataaatcatgctaaggcgaggatgaaaccgatatcgccgat

SEQ ID NO: 82302 - DNA, 120 bp, Homo sapiens
  misc_feature: 395 for SV(C|O) and mtDNA
accgtatcggcgatatcggtttcatcctcgccttagcatgatttatcctacactccaactcatgagacccacaacaaatagcccttctaaacgctaatccaagcctcaccccactactag

SEQ ID NO: 82303 - DNA, 120 bp, Homo sapiens
  misc_feature: 395 for SV(C|O) and mtDNA
caaccgtatcggcgatatcggtttcatcctcgccttagcatgatttatcctacactccaactcatgagacccacaacaaatagcccttctaaacgctaatccaagcctcaccccactact

SEQ ID NO: 82304 - DNA, 120 bp, Homo sapiens; identical to SEQ ID NO: 61790
  misc_feature: 394 for SV(C|O) and mtDNA

SEQ ID NO: 82305 - DNA, 120 bp, Homo sapiens
  misc_feature: 394 for SV(C|O) and mtDNA
acccacaacaaatagcccttctaaacgctaatccaagcctcaccccactactaggcctcctcctagcagcagcaggcaaatcagcccaattaggtctccacccctgactcccctcagcca

SEQ ID NO: 82306 - DNA, 120 bp, Homo sapiens; identical to SEQ ID NO: 60687
  misc_feature: 394 for SV(C|O) and mtDNA

SEQ ID NO: 82307 - DNA, 120 bp, Homo sapiens; identical to SEQ ID NO: 61925
  misc_feature: 394 for SV(C|O) and mtDNA

SEQ ID NO: 82308 - DNA, 120 bp, Homo sapiens
  misc_feature: 394 for SV(C|O) and mtDNA
taaacacatctctgccaaaccccaaaaacaaagaaccctaacaccagcctaaccagatttcaaattttatcttttggcggtatgcacttttaacagtcaccccccaactaacacattatt

SEQ ID NO: 82309 - DNA, 120 bp, Homo sapiens; identical to SEQ ID NO: 62199
  misc_feature: 394 for SV(C|O) and mtDNA

SEQ ID NO: 82310 - DNA, 120 bp, Homo sapiens
  misc_feature: 394 for SV(C|O) and mtDNA
gtatagcttagttaaactttcgtttattgctaaaggttaatcactgctgtttcccgtgggggtgtggctaggctaagcgttttgagctgcattgctgcgtgcttgatgcttgtccctttt

SEQ ID NO: 82311 - DNA, 120 bp, Homo sapiens
  misc_feature: 394 for SV(C|O) and mtDNA
acactccaactcatgagacccacaacaaatagcccttctaaacgctaatccaagcctcaccccactactaggcctcctcctagcagcagcaggcaaatcagcccaattaggtctccaccc

SEQ ID NO: 82312 - DNA, 120 bp, Homo sapiens
  misc_feature: 394 for SV(C|O) and mtDNA
cgttgtaggcccctacgggctactacaacccttcgctgacgccataaaactcttcaccaaagagcccctaaaacccgccacatctaccatcaccctctacatcaccgccccgaccttagc

SEQ ID NO: 82313 - DNA, 120 bp, Homo sapiens
  misc_feature: 394 for SV(C|O) and mtDNA
acacatctctgccaaaccccaaaaacaaagaaccctaacaccagcctaaccagatttcaaattttatcttttggcggtatgcacttttaacagtcaccccccaactaacacattattttc

SEQ ID NO: 82314 - DNA, 120 bp, Homo sapiens
  misc_feature: 393 for SV(C|O) and mtDNA
tttatggggtgatgtgagcccgtctaaacattttcagtgtattgctttgaggaggtaagctacataaactgtggggggtgtctttggggtttggttggttcggggtatggggttagcagc

SEQ ID NO: 82315 - DNA, 120 bp, Homo sapiens
  misc_feature: 393 for SV(C|O) and mtDNA
ttaaacacatctctgccaaaccccaaaaacaaagaaccctaacaccagcctaaccagatttcaaattttatcttttggcggtatgcacttttaacagtcaccccccaactaacacattat

SEQ ID NO: 82316 - DNA, 120 bp, Homo sapiens
  misc_feature: 393 for SV(C|O) and mtDNA
gttgtaggcccctacgggctactacaacccttcgctgacgccataaaactcttcaccaaagagcccctaaaacccgccacatctaccatcaccctctacatcaccgccccgaccttagct

SEQ ID NO: 82317 - DNA, 120 bp, Homo sapiens
  misc_feature: 393 for SV(C|O) and mtDNA
caactcatgagacccacaacaaatagcccttctaaacgctaatccaagcctcaccccactactaggcctcctcctagcagcagcaggcaaatcagcccaattaggtctccacccctgact

SEQ ID NO: 82318 - DNA, 120 bp, Homo sapiens
  misc_feature: 392 for SV(C|O) and mtDNA
gggatgcttgcatgtgtaatcttactaagagctaatagaaaggctaggaccaaacctatttgtttatggggtgatgtgagcccgtctaaacattttcagtgtattgctttgaggaggtaa

SEQ ID NO: 82319 - DNA, 120 bp, Homo sapiens
  misc_feature: 392 for SV(C|O) and mtDNA
tagtctcaggcttcaacatcgaatacgccgcaggccccttcgccttattcttcatagccgaatacacaaacattattataataaacaccctcaccactacaatcttcctaggaacaacat

SEQ ID NO: 82320 - DNA, 120 bp, Homo sapiens; identical to SEQ ID NO: 57608
  misc_feature: 392 for SV(C|O) and mtDNA

SEQ ID NO: 82321 - DNA, 120 bp, Homo sapiens
  misc_feature: 392 for SV(C|O) and mtDNA
gagtccgaactagtctcaggcttcaacatcgaatacgccgcaggccccttcgccttattcttcatagccgaatacacaaacattattataataaacaccctcaccactacaatcttccta

SEQ ID NO: 82322 - DNA, 120 bp, Homo sapiens
  misc_feature: 392 for SV(C|O) and mtDNA
aaaaaaagtaaaaggaactcggcaaatcttaccccgcctgtttaccaaaaacatcacctctagcatcaccagtattagaggcaccgcctgcccagtgacacatgtttaacggccgcggta

SEQ ID NO: 82323 - DNA, 120 bp, Homo sapiens
  misc_feature: 392 for SV(C|O) and mtDNA
actagtctcaggcttcaacatcgaatacgccgcaggccccttcgccttattcttcatagccgaatacacaaacattattataataaacaccctcaccactacaatcttcctaggaacaac

SEQ ID NO: 82324 - DNA, 120 bp, Homo sapiens
  misc_feature: 392 for SV(C|O) and mtDNA
aaaaaagtaaaaggaactcggcaaatcttaccccgcctgtttaccaaaaacatcacctctagcatcaccagtattagaggcaccgcctgcccagtgacacatgtttaacggccgcggtac

SEQ ID NO: 82325 - DNA, 120 bp, Homo sapiens
  misc_feature: 392 for SV(C|O) and mtDNA
cactccaactcatgagacccacaacaaatagcccttctaaacgctaatccaagcctcaccccactactaggcctcctcctagcagcagcaggcaaatcagcccaattaggtctccacccc

SEQ ID NO: 82326 - DNA, 120 bp, Homo sapiens
  misc_feature: 392 for SV(C|O) and mtDNA
ggaacggggatgcttgcatgtgtaatcttactaagagctaatagaaaggctaggaccaaacctatttgtttatggggtgatgtgagcccgtctaaacattttcagtgtattgctttgagg

SEQ ID NO: 82327 - DNA, 120 bp, Homo sapiens
  misc_feature: 392 for SV(C|O) and mtDNA
agtccgaactagtctcaggcttcaacatcgaatacgccgcaggccccttcgccttattcttcatagccgaatacacaaacattattataataaacaccctcaccactacaatcttcctag

SEQ ID NO: 82328 - DNA, 120 bp, Homo sapiens
  misc_feature: 392 for SV(C|O) and mtDNA
cccacaacaaatagcccttctaaacgctaatccaagcctcaccccactactaggcctcctcctagcagcagcaggcaaatcagcccaattaggtctccacccctgactcccctcagccat

SEQ ID NO: 82329 - DNA, 120 bp, Homo sapiens
  misc_feature: 391 for SV(C|O) and mtDNA
ttatggggtgatgtgagcccgtctaaacattttcagtgtattgctttgaggaggtaagctacataaactgtggggggtgtctttggggtttggttggttcggggtatggggttagcagcg

SEQ ID NO: 82330 - DNA, 120 bp, Homo sapiens
  misc_feature: 391 for SV(C|O) and mtDNA
ctagtctcaggcttcaacatcgaatacgccgcaggccccttcgccttattcttcatagccgaatacacaaacattattataataaacaccctcaccactacaatcttcctaggaacaaca

SEQ ID NO: 82331 - DNA, 120 bp, Homo sapiens; identical to SEQ ID NO: 61669
  misc_feature: 391 for SV(C|O) and mtDNA

SEQ ID NO: 82332 - DNA, 120 bp, Homo sapiens
  misc_feature: 391 for SV(C|O) and mtDNA
ataaaaataaaaaattataacaaaccctgagaaccaaaatgaacgaaaatctgttcgcttcattcattgcccccacaatcctaggcctacccgccgcagtactgatcattctatttcccc

SEQ ID NO: 82333 - DNA, 120 bp, Homo sapiens
  misc_feature: 391 for SV(C|O) and mtDNA
ctccaactcatgagacccacaacaaatagcccttctaaacgctaatccaagcctcaccccactactaggcctcctcctagcagcagcaggcaaatcagcccaattaggtctccacccctg

SEQ ID NO: 82334 - DNA, 120 bp, Homo sapiens
  misc_feature: 391 for SV(C|O) and mtDNA
cacaacaaatagcccttctaaacgctaatccaagcctcaccccactactaggcctcctcctagcagcagcaggcaaatcagcccaattaggtctccacccctgactcccctcagccatag

SEQ ID NO: 82335 - DNA, 120 bp, Homo sapiens; identical to SEQ ID NO: 61917
  misc_feature: 391 for SV(C|O) and mtDNA

SEQ ID NO: 82336 - DNA, 120 bp, Homo sapiens
  misc_feature: 390 for SV(C|O) and mtDNA
cccctctgacatccggcctgcttcttctcacatgacaaaaactagcccccatctcaatcatataccaaatctctccctcactaaacgtaagccttctcctcactctctcaatcttatcca

SEQ ID NO: 82337 - DNA, 120 bp, Homo sapiens
  misc_feature: 390 for SV(C|O) and mtDNA
tatacaaccgtatcggcgatatcggtttcatcctcgccttagcatgatttatcctacactccaactcatgagacccacaacaaatagcccttctaaacgctaatccaagcctcaccccac

SEQ ID NO: 82338 - DNA, 120 bp, Homo sapiens
  misc_feature: 390 for SV(C|O) and mtDNA
cttaaacacatctctgccaaaccccaaaaacaaagaaccctaacaccagcctaaccagatttcaaattttatcttttggcggtatgcacttttaacagtcaccccccaactaacacatta

SEQ ID NO: 82339 - DNA, 120 bp, Homo sapiens
  misc_feature: 390 for SV(C|O) and mtDNA
atcctatacaaccgtatcggcgatatcggtttcatcctcgccttagcatgatttatcctacactccaactcatgagacccacaacaaatagcccttctaaacgctaatccaagcctcacc

SEQ ID NO: 82340 - DNA, 120 bp, Homo sapiens; identical to SEQ ID NO: 61701
  misc_feature: 390 for SV(C|O) and mtDNA

SEQ ID NO: 82341 - DNA, 120 bp, Homo sapiens
  misc_feature: 390 for SV(C|O) and mtDNA
ctaggaccaaacctatttgtttatggggtgatgtgagcccgtctaaacattttcagtgtattgctttgaggaggtaagctacataaactgtggggggtgtctttggggtttggttggttc

SEQ ID NO: 82342 - DNA, 120 bp, Homo sapiens; identical to SEQ ID NO: 60634
  misc_feature: 389 for SV(C|O) and mtDNA

SEQ ID NO: 82343 - DNA, 120 bp, Homo sapiens
  misc_feature: 389 for SV(C|O) and mtDNA
cgccgcaggccccttcgccttattcttcatagccgaatacacaaacattattataataaacaccctcaccactacaatcttcctaggaacaacatatgacgcactctcccctgaactcta

SEQ ID NO: 82344 - DNA, 120 bp, Homo sapiens
  misc_feature: 389 for SV(C|O) and mtDNA
ccaaacctatttgtttatggggtgatgtgagcccgtctaaacattttcagtgtattgctttgaggaggtaagctacataaactgtggggggtgtctttggggtttggttggttcggggta

SEQ ID NO: 82345 - DNA, 120 bp, Homo sapiens
  misc_feature: 389 for SV(C|O) and mtDNA
gtctcaggcttcaacatcgaatacgccgcaggccccttcgccttattcttcatagccgaatacacaaacattattataataaacaccctcaccactacaatcttcctaggaacaacatat

SEQ ID NO: 82346 - DNA, 120 bp, Homo sapiens; identical to SEQ ID NO: 62120
  misc_feature: 389 for SV(C|O) and mtDNA

SEQ ID NO: 82347 - DNA, 120 bp, Homo sapiens
  misc_feature: 389 for SV(C|O) and mtDNA
ccgtatcggcgatatcggtttcatcctcgccttagcatgatttatcctacactccaactcatgagacccacaacaaatagcccttctaaacgctaatccaagcctcaccccactactagg

SEQ ID NO: 82348 - DNA, 120 bp, Homo sapiens
  misc_feature: 388 for SV(C|O) and mtDNA
tacaaccgtatcggcgatatcggtttcatcctcgccttagcatgatttatcctacactccaactcatgagacccacaacaaatagcccttctaaacgctaatccaagcctcaccccacta

SEQ ID NO: 82349 - DNA, 120 bp, Homo sapiens; identical to SEQ ID NO: 57236
  misc_feature: 388 for SV(C|O) and mtDNA

SEQ ID NO: 82350 - DNA, 120 bp, Homo sapiens
  misc_feature: 388 for SV(C|O) and mtDNA
aaggttaaaaaaagtaaaaggaactcggcaaatcttaccccgcctgtttaccaaaaacatcacctctagcatcaccagtattagaggcaccgcctgcccagtgacacatgtttaacggcc

SEQ ID NO: 82351 - DNA, 120 bp, Homo sapiens
  misc_feature: 388 for SV(C|O) and mtDNA
aaccaaccaaaccccaaagacaccccccacagtttatgtagcttacctcctcaaagcaatacactgaaaatgtttagacgggctcacatcaccccataaacaaataggtttggtcctagc

SEQ ID NO: 82352 - DNA, 120 bp, Homo sapiens
  misc_feature: 388 for SV(C|O) and mtDNA
gcctagtagtggggtgaggcttggattagcgtttagaagggctatttgttgtgggtctcatgagttggagtgtaggataaatcatgctaaggcgaggatgaaaccgatatcgccgatacg

SEQ ID NO: 82353 - DNA, 120 bp, Homo sapiens
  misc_feature: 388 for SV(C|O) and mtDNA
acttgggttaatcgtgtgaccgcggtggctggcacgaaattgaccaaccctggggttagtatagcttagttaaactttcgtttattgctaaaggttaatcactgctgtttcccgtggggg

SEQ ID NO: 82354 - DNA, 120 bp, Homo sapiens
  misc_feature: 388 for SV(C|O) and mtDNA
accaaacctatttgtttatggggtgatgtgagcccgtctaaacattttcagtgtattgctttgaggaggtaagctacataaactgtggggggtgtctttggggtttggttggttcggggt

SEQ ID NO: 82355 - DNA, 120 bp, Homo sapiens; identical to SEQ ID NO: 62171
  misc_feature: 387 for SV(C|O) and mtDNA

SEQ ID NO: 82356 - DNA, 120 bp, Homo sapiens
  misc_feature: 387 for SV(C|O) and mtDNA
ctatacaaccgtatcggcgatatcggtttcatcctcgccttagcatgatttatcctacactccaactcatgagacccacaacaaatagcccttctaaacgctaatccaagcctcacccca

SEQ ID NO: 82357 - DNA, 120 bp, Homo sapiens; identical to SEQ ID NO: 61157
  misc_feature: 387 for SV(C|O) and mtDNA

SEQ ID NO: 82358 - DNA, 120 bp, Homo sapiens
  misc_feature: 387 for SV(C|O) and mtDNA
agtctcaggcttcaacatcgaatacgccgcaggccccttcgccttattcttcatagccgaatacacaaacattattataataaacaccctcaccactacaatcttcctaggaacaacata

SEQ ID NO: 82359 - DNA, 120 bp, Homo sapiens
  misc_feature: 387 for SV(C|O) and mtDNA
ggggatgcttgcatgtgtaatcttactaagagctaatagaaaggctaggaccaaacctatttgtttatggggtgatgtgagcccgtctaaacattttcagtgtattgctttgaggaggta

SEQ ID NO: 82360 - DNA, 120 bp, Homo sapiens
  misc_feature: 387 for SV(C|O) and mtDNA
cctatacaaccgtatcggcgatatcggtttcatcctcgccttagcatgatttatcctacactccaactcatgagacccacaacaaatagcccttctaaacgctaatccaagcctcacccc

SEQ ID NO: 82361 - DNA, 120 bp, Homo sapiens
  misc_feature: 387 for SV(C|O) and mtDNA
accaaccaaaccccaaagacaccccccacagtttatgtagcttacctcctcaaagcaatacactgaaaatgtttagacgggctcacatcaccccataaacaaataggtttggtcctagcc

SEQ ID NO: 82362 - DNA, 120 bp, Homo sapiens; identical to SEQ ID NO: 60741
  misc_feature: 387 for SV(C|O) and mtDNA

SEQ ID NO: 82363 - DNA, 120 bp, Homo sapiens
  misc_feature: 387 for SV(C|O) and mtDNA
atcgaatacgccgcaggccccttcgccttattcttcatagccgaatacacaaacattattataataaacaccctcaccactacaatcttcctaggaacaacatatgacgcactctcccct

SEQ ID NO: 82364 - DNA, 120 bp, Homo sapiens; identical to SEQ ID NO: 56857
  misc_feature: 386 for SV(C|O) and mtDNA

SEQ ID NO: 82365 - DNA, 120 bp, Homo sapiens
  misc_feature: 386 for SV(C|O) and mtDNA
tgtaggcccctacgggctactacaacccttcgctgacgccataaaactcttcaccaaagagcccctaaaacccgccacatctaccatcaccctctacatcaccgccccgaccttagctct

SEQ ID NO: 82366 - DNA, 120 bp, Homo sapiens
  misc_feature: 386 for SV(C|O) and mtDNA
tctcaggcttcaacatcgaatacgccgcaggccccttcgccttattcttcatagccgaatacacaaacattattataataaacaccctcaccactacaatcttcctaggaacaacatatg

SEQ ID NO: 82367 - DNA, 120 bp, Homo sapiens
  misc_feature: 386 for SV(C|O) and mtDNA
cgaactagtctcaggcttcaacatcgaatacgccgcaggccccttcgccttattcttcatagccgaatacacaaacattattataataaacaccctcaccactacaatcttcctaggaac

SEQ ID NO: 82368 - DNA, 120 bp, Homo sapiens
  misc_feature: 386 for SV(C|O) and mtDNA
ggttaaaaaaagtaaaaggaactcggcaaatcttaccccgcctgtttaccaaaaacatcacctctagcatcaccagtattagaggcaccgcctgcccagtgacacatgtttaacggccgc

SEQ ID NO: 82369 - DNA, 120 bp, Homo sapiens
  misc_feature: 386 for SV(C|O) and mtDNA
ggaccaaacctatttgtttatggggtgatgtgagcccgtctaaacattttcagtgtattgctttgaggaggtaagctacataaactgtggggggtgtctttggggtttggttggttcggg

SEQ ID NO: 82370 - DNA, 120 bp, Homo sapiens
  misc_feature: 386 for SV(C|O) and mtDNA
aagcatcaagcacgcagcaatgcagctcaaaacgcttagcctagccacacccccacgggaaacagcagtgattaacctttagcaataaacgaaagtttaactaagctatactaaccccag

SEQ ID NO: 82371 - DNA, 120 bp, Homo sapiens
  misc_feature: 386 for SV(C|O) and mtDNA
ccctctgacatccggcctgcttcttctcacatgacaaaaactagcccccatctcaatcatataccaaatctctccctcactaaacgtaagccttctcctcactctctcaatcttatccat

SEQ ID NO: 82372 - DNA, 120 bp, Homo sapiens
  misc_feature: 386 for SV(C|O) and mtDNA
atacaaccgtatcggcgatatcggtttcatcctcgccttagcatgatttatcctacactccaactcatgagacccacaacaaatagcccttctaaacgctaatccaagcctcaccccact

SEQ ID NO: 82373 - DNA, 120 bp, Homo sapiens
  misc_feature: 385 for SV(C|O) and mtDNA
tatggggtgatgtgagcccgtctaaacattttcagtgtattgctttgaggaggtaagctacataaactgtggggggtgtctttggggtttggttggttcggggtatggggttagcagcgg

SEQ ID NO: 82374 - DNA, 120 bp, Homo sapiens; identical to SEQ ID NO: 57145
  misc_feature: 385 for SV(C|O) and mtDNA

SEQ ID NO: 82375 - DNA, 120 bp, Homo sapiens
  misc_feature: 385 for SV(C|O) and mtDNA
ctaccacctacctccctcaccaaagcccataaaaataaaaaattataacaaaccctgagaaccaaaatgaacgaaaatctgttcgcttcattcattgcccccacaatcctaggcctaccc

SEQ ID NO: 82376 - DNA, 120 bp, Homo sapiens
  misc_feature: 385 for SV(C|O) and mtDNA
atcaagcacgcagcaatgcagctcaaaacgcttagcctagccacacccccacgggaaacagcagtgattaacctttagcaataaacgaaagtttaactaagctatactaaccccagggtt

SEQ ID NO: 82377 - DNA, 120 bp, Homo sapiens
  misc_feature: 384 for SV(C|O) and mtDNA
tgggttatggcagggggttttatattgataattgttgtgatgaagttgatggcccctaagatagaggagacacctgctaggtgtaaggagaagatggttaggtctacggaggctccaggg

SEQ ID NO: 82378 - DNA, 120 bp, Homo sapiens
  misc_feature: 384 for SV(C|O) and mtDNA
tccaactcatgagacccacaacaaatagcccttctaaacgctaatccaagcctcaccccactactaggcctcctcctagcagcagcaggcaaatcagcccaattaggtctccacccctga

SEQ ID NO: 82379 - DNA, 120 bp, Homo sapiens
  misc_feature: 384 for SV(C|O) and mtDNA
ggggttttatattgataattgttgtgatgaagttgatggcccctaagatagaggagacacctgctaggtgtaaggagaagatggttaggtctacggaggctccagggtgggagtagttcc

SEQ ID NO: 82380 - DNA, 120 bp, Homo sapiens
  misc_feature: 384 for SV(C|O) and mtDNA
cacatctctgccaaaccccaaaaacaaagaaccctaacaccagcctaaccagatttcaaattttatcttttggcggtatgcacttttaacagtcaccccccaactaacacattattttcc

SEQ ID NO: 82381 - DNA, 120 bp, Homo sapiens
  misc_feature: 384 for SV(C|O) and mtDNA
aacggggatgcttgcatgtgtaatcttactaagagctaatagaaaggctaggaccaaacctatttgtttatggggtgatgtgagcccgtctaaacattttcagtgtattgctttgaggag

SEQ ID NO: 82382 - DNA, 120 bp, Homo sapiens
  misc_feature: 384 for SV(C|O) and mtDNA
agcatcaagcacgcagcaatgcagctcaaaacgcttagcctagccacacccccacgggaaacagcagtgattaacctttagcaataaacgaaagtttaactaagctatactaaccccagg

SEQ ID NO: 82383 - DNA, 120 bp, Homo sapiens
  misc_feature: 384 for SV(C|O) and mtDNA
catcaagcacgcagcaatgcagctcaaaacgcttagcctagccacacccccacgggaaacagcagtgattaacctttagcaataaacgaaagtttaactaagctatactaaccccagggt

SEQ ID NO: 82384 - DNA, 120 bp, Homo sapiens; identical to SEQ ID NO: 62235
  misc_feature: 383 for SV(C|O) and mtDNA

SEQ ID NO: 82385 - DNA, 120 bp, Homo sapiens; identical to SEQ ID NO: 60486
  misc_feature: 383 for SV(C|O) and mtDNA

SEQ ID NO: 82386 - DNA, 120 bp, Homo sapiens
  misc_feature: 383 for SV(C|O) and mtDNA
acaagcatcaagcacgcagcaatgcagctcaaaacgcttagcctagccacacccccacgggaaacagcagtgattaacctttagcaataaacgaaagtttaactaagctatactaacccc

SEQ ID NO: 82387 - DNA, 120 bp, Homo sapiens
  misc_feature: 383 for SV(C|O) and mtDNA
ggggtgatgtgagcccgtctaaacattttcagtgtattgctttgaggaggtaagctacataaactgtggggggtgtctttggggtttggttggttcggggtatggggttagcagcggtgt

SEQ ID NO: 82388 - DNA, 120 bp, Homo sapiens
  misc_feature: 383 for SV(C|O) and mtDNA
gaccaaacctatttgtttatggggtgatgtgagcccgtctaaacattttcagtgtattgctttgaggaggtaagctacataaactgtggggggtgtctttggggtttggttggttcgggg

SEQ ID NO: 82389 - DNA, 120 bp, Homo sapiens
  misc_feature: 383 for SV(C|O) and mtDNA
aggttaaaaaaagtaaaaggaactcggcaaatcttaccccgcctgtttaccaaaaacatcacctctagcatcaccagtattagaggcaccgcctgcccagtgacacatgtttaacggccg

SEQ ID NO: 82390 - DNA, 120 bp, Homo sapiens; identical to SEQ ID NO: 60307
  misc_feature: 383 for SV(C|O) and mtDNA

SEQ ID NO: 82391 - DNA, 120 bp, Homo sapiens
  misc_feature: 383 for SV(C|O) and mtDNA
aggaccaaacctatttgtttatggggtgatgtgagcccgtctaaacattttcagtgtattgctttgaggaggtaagctacataaactgtggggggtgtctttggggtttggttggttcgg

SEQ ID NO: 82392 - DNA, 120 bp, Homo sapiens
  misc_feature: 383 for SV(C|O) and mtDNA
atggggtgatgtgagcccgtctaaacattttcagtgtattgctttgaggaggtaagctacataaactgtggggggtgtctttggggtttggttggttcggggtatggggttagcagcggt

SEQ ID NO: 82393 - DNA, 120 bp, Homo sapiens
  misc_feature: 382 for SV(C|O) and mtDNA
tggagcctccgtagacctaaccatcttctccttacacctagcaggtgtctcctctatcttaggggccatcaacttcatcacaacaattatcaatataaaaccccctgccataacccaata

SEQ ID NO: 82394 - DNA, 120 bp, Homo sapiens
  misc_feature: 382 for SV(C|O) and mtDNA
ctctgacatccggcctgcttcttctcacatgacaaaaactagcccccatctcaatcatataccaaatctctccctcactaaacgtaagccttctcctcactctctcaatcttatccatca

SEQ ID NO: 82395 - DNA, 120 bp, Homo sapiens
  misc_feature: 382 for SV(C|O) and mtDNA
taggaccaaacctatttgtttatggggtgatgtgagcccgtctaaacattttcagtgtattgctttgaggaggtaagctacataaactgtggggggtgtctttggggtttggttggttcg

SEQ ID NO: 82396 - DNA, 120 bp, Homo sapiens
  misc_feature: 382 for SV(C|O) and mtDNA
gtttatggggtgatgtgagcccgtctaaacattttcagtgtattgctttgaggaggtaagctacataaactgtggggggtgtctttggggtttggttggttcggggtatggggttagcag

SEQ ID NO: 82397 - DNA, 120 bp, Homo sapiens
  misc_feature: 382 for SV(C|O) and mtDNA
caaccaaaccccaaagacaccccccacagtttatgtagcttacctcctcaaagcaatacactgaaaatgtttagacgggctcacatcaccccataaacaaataggtttggtcctagcctt

SEQ ID NO: 82398 - DNA, 120 bp, Homo sapiens; identical to SEQ ID NO: 61851
  misc_feature: 381 for SV(C|O) and mtDNA

SEQ ID NO: 82399 - DNA, 120 bp, Homo sapiens
  misc_feature: 381 for SV(C|O) and mtDNA
tcctatacaaccgtatcggcgatatcggtttcatcctcgccttagcatgatttatcctacactccaactcatgagacccacaacaaatagcccttctaaacgctaatccaagcctcaccc

SEQ ID NO: 82400 - DNA, 120 bp, Homo sapiens
  misc_feature: 381 for SV(C|O) and mtDNA
tcaagcacgcagcaatgcagctcaaaacgcttagcctagccacacccccacgggaaacagcagtgattaacctttagcaataaacgaaagtttaactaagctatactaaccccagggttg

SEQ ID NO: 82401 - DNA, 120 bp, Homo sapiens; identical to SEQ ID NO: 57495
  misc_feature: 381 for SV(C|O) and mtDNA

SEQ ID NO: 82402 - DNA, 120 bp, Homo sapiens
  misc_feature: 381 for SV(C|O) and mtDNA
catctctgccaaaccccaaaaacaaagaaccctaacaccagcctaaccagatttcaaattttatcttttggcggtatgcacttttaacagtcaccccccaactaacacattattttcccc

SEQ ID NO: 82403 - DNA, 120 bp, Homo sapiens; identical to SEQ ID NO: 60674
  misc_feature: 381 for SV(C|O) and mtDNA

SEQ ID NO: 82404 - DNA, 120 bp, Homo sapiens; identical to SEQ ID NO: 60737
  misc_feature: 381 for SV(C|O) and mtDNA

SEQ ID NO: 82405 - DNA, 120 bp, Homo sapiens
  misc_feature: 381 for SV(C|O) and mtDNA
cctctgacatccggcctgcttcttctcacatgacaaaaactagcccccatctcaatcatataccaaatctctccctcactaaacgtaagccttctcctcactctctcaatcttatccatc

SEQ ID NO: 82406 - DNA, 120 bp, Homo sapiens; identical to SEQ ID NO: 61074
  misc_feature: 381 for SV(C|O) and mtDNA

SEQ ID NO: 82407 - DNA, 120 bp, Homo sapiens
  misc_feature: 381 for SV(C|O) and mtDNA
ccaaccaaaccccaaagacaccccccacagtttatgtagcttacctcctcaaagcaatacactgaaaatgtttagacgggctcacatcaccccataaacaaataggtttggtcctagcct

SEQ ID NO: 82408 - DNA, 120 bp, Homo sapiens
  misc_feature: 381 for SV(C|O) and mtDNA
aaccaaaccccaaagacaccccccacagtttatgtagcttacctcctcaaagcaatacactgaaaatgtttagacgggctcacatcaccccataaacaaataggtttggtcctagccttt

SEQ ID NO: 82409 - DNA, 120 bp, Homo sapiens; identical to SEQ ID NO: 62158
  misc_feature: 380 for SV(C|O) and mtDNA

SEQ ID NO: 82410 - DNA, 120 bp, Homo sapiens
  misc_feature: 380 for SV(C|O) and mtDNA
ctgacatccggcctgcttcttctcacatgacaaaaactagcccccatctcaatcatataccaaatctctccctcactaaacgtaagccttctcctcactctctcaatcttatccatcata

SEQ ID NO: 82411 - DNA, 120 bp, Homo sapiens
  misc_feature: 380 for SV(C|O) and mtDNA
taatcgtgtgaccgcggtggctggcacgaaattgaccaaccctggggttagtatagcttagttaaactttcgtttattgctaaaggttaatcactgctgtttcccgtgggggtgtggcta

SEQ ID NO: 82412 - DNA, 120 bp, Homo sapiens
  misc_feature: 380 for SV(C|O) and mtDNA
cacacacaccgctgctaaccccataccccgaaccaaccaaaccccaaagacaccccccacagtttatgtagcttacctcctcaaagcaatacactgaaaatgtttagacgggctcacatc

SEQ ID NO: 82413 - DNA, 120 bp, Homo sapiens
  misc_feature: 380 for SV(C|O) and mtDNA
accaaaccccaaagacaccccccacagtttatgtagcttacctcctcaaagcaatacactgaaaatgtttagacgggctcacatcaccccataaacaaataggtttggtcctagcctttc

SEQ ID NO: 82414 - DNA, 120 bp, Homo sapiens
  misc_feature: 380 for SV(C|O) and mtDNA
acgcagcaatgcagctcaaaacgcttagcctagccacacccccacgggaaacagcagtgattaacctttagcaataaacgaaagtttaactaagctatactaaccccagggttggtcaat

SEQ ID NO: 82415 - DNA, 120 bp, Homo sapiens; identical to SEQ ID NO: 59837
  misc_feature: 380 for SV(C|O) and mtDNA

SEQ ID NO: 82416 - DNA, 120 bp, Homo sapiens; identical to SEQ ID NO: 61752
  misc_feature: 379 for SV(C|O) and mtDNA

SEQ ID NO: 82417 - DNA, 120 bp, Homo sapiens
  misc_feature: 379 for SV(C|O) and mtDNA
ttaatcgtgtgaccgcggtggctggcacgaaattgaccaaccctggggttagtatagcttagttaaactttcgtttattgctaaaggttaatcactgctgtttcccgtgggggtgtggct

SEQ ID NO: 82418 - DNA, 120 bp, Homo sapiens
  misc_feature: 379 for SV(C|O) and mtDNA
caagcatcaagcacgcagcaatgcagctcaaaacgcttagcctagccacacccccacgggaaacagcagtgattaacctttagcaataaacgaaagtttaactaagctatactaacccca

SEQ ID NO: 82419 - DNA, 120 bp, Homo sapiens
  misc_feature: 379 for SV(C|O) and mtDNA
caaaccccaaagacaccccccacagtttatgtagcttacctcctcaaagcaatacactgaaaatgtttagacgggctcacatcaccccataaacaaataggtttggtcctagcctttcta

SEQ ID NO: 82420 - DNA, 120 bp, Homo sapiens
  misc_feature: 379 for SV(C|O) and mtDNA
ggatgcttgcatgtgtaatcttactaagagctaatagaaaggctaggaccaaacctatttgtttatggggtgatgtgagcccgtctaaacattttcagtgtattgctttgaggaggtaag

SEQ ID NO: 82421 - DNA, 120 bp, Homo sapiens
  misc_feature: 379 for SV(C|O) and mtDNA
gcatcaagcacgcagcaatgcagctcaaaacgcttagcctagccacacccccacgggaaacagcagtgattaacctttagcaataaacgaaagtttaactaagctatactaaccccaggg

SEQ ID NO: 82422 - DNA, 120 bp, Homo sapiens
  misc_feature: 379 for SV(C|O) and mtDNA
gcacacacaccgctgctaaccccataccccgaaccaaccaaaccccaaagacaccccccacagtttatgtagcttacctcctcaaagcaatacactgaaaatgtttagacgggctcacat

SEQ ID NO: 82423 - DNA, 120 bp, Homo sapiens; identical to SEQ ID NO: 59967
  misc_feature: 379 for SV(C|O) and mtDNA

SEQ ID NO: 82424 - DNA, 120 bp, Homo sapiens
  misc_feature: 379 for SV(C|O) and mtDNA
ctggagcctccgtagacctaaccatcttctccttacacctagcaggtgtctcctctatcttaggggccatcaacttcatcacaacaattatcaatataaaaccccctgccataacccaat

SEQ ID NO: 82425 - DNA, 120 bp, Homo sapiens; identical to SEQ ID NO: 61144
  misc_feature: 379 for SV(C|O) and mtDNA

SEQ ID NO: 82426 - DNA, 120 bp, Homo sapiens
  misc_feature: 379 for SV(C|O) and mtDNA
acggggatgcttgcatgtgtaatcttactaagagctaatagaaaggctaggaccaaacctatttgtttatggggtgatgtgagcccgtctaaacattttcagtgtattgctttgaggagg

SEQ ID NO: 82427 - DNA, 120 bp, Homo sapiens
  misc_feature: 378 for SV(C|O) and mtDNA
ccgaactagtctcaggcttcaacatcgaatacgccgcaggccccttcgccttattcttcatagccgaatacacaaacattattataataaacaccctcaccactacaatcttcctaggaa

SEQ ID NO: 82428 - DNA, 120 bp, Homo sapiens
  misc_feature: 378 for SV(C|O) and mtDNA
agcacacacaccgctgctaaccccataccccgaaccaaccaaaccccaaagacaccccccacagtttatgtagcttacctcctcaaagcaatacactgaaaatgtttagacgggctcaca

SEQ ID NO: 82429 - DNA, 120 bp, Homo sapiens
  misc_feature: 378 for SV(C|O) and mtDNA
tggggtgatgtgagcccgtctaaacattttcagtgtattgctttgaggaggtaagctacataaactgtggggggtgtctttggggtttggttggttcggggtatggggttagcagcggtg

SEQ ID NO: 82430 - DNA, 120 bp, Homo sapiens
  misc_feature: 378 for SV(C|O) and mtDNA
gtccgaactagtctcaggcttcaacatcgaatacgccgcaggccccttcgccttattcttcatagccgaatacacaaacattattataataaacaccctcaccactacaatcttcctagg

SEQ ID NO: 82431 - DNA, 120 bp, Homo sapiens
  misc_feature: 378 for SV(C|O) and mtDNA
gggttatggcagggggttttatattgataattgttgtgatgaagttgatggcccctaagatagaggagacacctgctaggtgtaaggagaagatggttaggtctacggaggctccagggt

SEQ ID NO: 82432 - DNA, 120 bp, Homo sapiens
  misc_feature: 378 for SV(C|O) and mtDNA
gggtgatgtgagcccgtctaaacattttcagtgtattgctttgaggaggtaagctacataaactgtggggggtgtctttggggtttggttggttcggggtatggggttagcagcggtgtg

SEQ ID NO: 82433 - DNA, 120 bp, Homo sapiens
  misc_feature: 378 for SV(C|O) and mtDNA
caagcacgcagcaatgcagctcaaaacgcttagcctagccacacccccacgggaaacagcagtgattaacctttagcaataaacgaaagtttaactaagctatactaaccccagggttgg

SEQ ID NO: 82434 - DNA, 120 bp, Homo sapiens
  misc_feature: 377 for SV(C|O) and mtDNA
cctggagcctccgtagacctaaccatcttctccttacacctagcaggtgtctcctctatcttaggggccatcaacttcatcacaacaattatcaatataaaaccccctgccataacccaa

SEQ ID NO: 82435 - DNA, 120 bp, Homo sapiens
  misc_feature: 377 for SV(C|O) and mtDNA
acatccggcctgcttcttctcacatgacaaaaactagcccccatctcaatcatataccaaatctctccctcactaaacgtaagccttctcctcactctctcaatcttatccatcatagca

SEQ ID NO: 82436 - DNA, 120 bp, Homo sapiens
  misc_feature: 377 for SV(C|O) and mtDNA
catcgaatacgccgcaggccccttcgccttattcttcatagccgaatacacaaacattattataataaacaccctcaccactacaatcttcctaggaacaacatatgacgcactctcccc

SEQ ID NO: 82437 - DNA, 120 bp, Homo sapiens
  misc_feature: 377 for SV(C|O) and mtDNA
cataaaaataaaaaattataacaaaccctgagaaccaaaatgaacgaaaatctgttcgcttcattcattgcccccacaatcctaggcctacccgccgcagtactgatcattctatttccc

SEQ ID NO: 82438 - DNA, 120 bp, Homo sapiens
  misc_feature: 377 for SV(C|O) and mtDNA
acatctctgccaaaccccaaaaacaaagaaccctaacaccagcctaaccagatttcaaattttatcttttggcggtatgcacttttaacagtcaccccccaactaacacattattttccc

SEQ ID NO: 82439 - DNA, 120 bp, Homo sapiens; identical to SEQ ID NO: 60645
  misc_feature: 377 for SV(C|O) and mtDNA

SEQ ID NO: 82440 - DNA, 120 bp, Homo sapiens
  misc_feature: 376 for SV(C|O) and mtDNA
tgacatccggcctgcttcttctcacatgacaaaaactagcccccatctcaatcatataccaaatctctccctcactaaacgtaagccttctcctcactctctcaatcttatccatcatag

SEQ ID NO: 82441 - DNA, 120 bp, Homo sapiens
  misc_feature: 376 for SV(C|O) and mtDNA
ccataaaaataaaaaattataacaaaccctgagaaccaaaatgaacgaaaatctgttcgcttcattcattgcccccacaatcctaggcctacccgccgcagtactgatcattctatttcc

SEQ ID NO: 82442 - DNA, 120 bp, Homo sapiens
  misc_feature: 375 for SV(C|O) and mtDNA
cacgcagcaatgcagctcaaaacgcttagcctagccacacccccacgggaaacagcagtgattaacctttagcaataaacgaaagtttaactaagctatactaaccccagggttggtcaa

SEQ ID NO: 82443 - DNA, 120 bp, Homo sapiens
  misc_feature: 375 for SV(C|O) and mtDNA
gcacttaaacacatctctgccaaaccccaaaaacaaagaaccctaacaccagcctaaccagatttcaaattttatcttttggcggtatgcacttttaacagtcaccccccaactaacaca

SEQ ID NO: 82444 - DNA, 120 bp, Homo sapiens
  misc_feature: 375 for SV(C|O) and mtDNA
tctgacatccggcctgcttcttctcacatgacaaaaactagcccccatctcaatcatataccaaatctctccctcactaaacgtaagccttctcctcactctctcaatcttatccatcat

SEQ ID NO: 82445 - DNA, 120 bp, Homo sapiens
  misc_feature: 375 for SV(C|O) and mtDNA
ggtgatgtgagcccgtctaaacattttcagtgtattgctttgaggaggtaagctacataaactgtggggggtgtctttggggtttggttggttcggggtatggggttagcagcggtgtgt

SEQ ID NO: 82446 - DNA, 120 bp, Homo sapiens
  misc_feature: 375 for SV(C|O) and mtDNA
gacatccggcctgcttcttctcacatgacaaaaactagcccccatctcaatcatataccaaatctctccctcactaaacgtaagccttctcctcactctctcaatcttatccatcatagc

SEQ ID NO: 82447 - DNA, 120 bp, Homo sapiens
  misc_feature: 374 for SV(C|O) and mtDNA
cacttaaacacatctctgccaaaccccaaaaacaaagaaccctaacaccagcctaaccagatttcaaattttatcttttggcggtatgcacttttaacagtcaccccccaactaacacat

SEQ ID NO: 82448 - DNA, 120 bp, Homo sapiens
  misc_feature: 374 for SV(C|O) and mtDNA
agggggttttatattgataattgttgtgatgaagttgatggcccctaagatagaggagacacctgctaggtgtaaggagaagatggttaggtctacggaggctccagggtgggagtagtt

SEQ ID NO: 82449 - DNA, 120 bp, Homo sapiens
  misc_feature: 374 for SV(C|O) and mtDNA
acttaaacacatctctgccaaaccccaaaaacaaagaaccctaacaccagcctaaccagatttcaaattttatcttttggcggtatgcacttttaacagtcaccccccaactaacacatt

SEQ ID NO: 82450 - DNA, 120 bp, Homo sapiens
  misc_feature: 373 for SV(C|O) and mtDNA
tgcttgcatgtgtaatcttactaagagctaatagaaaggctaggaccaaacctatttgtttatggggtgatgtgagcccgtctaaacattttcagtgtattgctttgaggaggtaagcta

SEQ ID NO: 82451 - DNA, 120 bp, Homo sapiens
  misc_feature: 373 for SV(C|O) and mtDNA
taccacctacctccctcaccaaagcccataaaaataaaaaattataacaaaccctgagaaccaaaatgaacgaaaatctgttcgcttcattcattgcccccacaatcctaggcctacccg

SEQ ID NO: 82452 - DNA, 120 bp, Homo sapiens
  misc_feature: 373 for SV(C|O) and mtDNA
cgcagcaatgcagctcaaaacgcttagcctagccacacccccacgggaaacagcagtgattaacctttagcaataaacgaaagtttaactaagctatactaaccccagggttggtcaatt

SEQ ID NO: 82453 - DNA, 120 bp, Homo sapiens
  misc_feature: 373 for SV(C|O) and mtDNA
ccaaaccccaaagacaccccccacagtttatgtagcttacctcctcaaagcaatacactgaaaatgtttagacgggctcacatcaccccataaacaaataggtttggtcctagcctttct

SEQ ID NO: 82454 - DNA, 120 bp, Homo sapiens; identical to SEQ ID NO: 60993
  misc_feature: 373 for SV(C|O) and mtDNA

SEQ ID NO: 82455 - DNA, 120 bp, Homo sapiens
  misc_feature: 373 for SV(C|O) and mtDNA
atctctgccaaaccccaaaaacaaagaaccctaacaccagcctaaccagatttcaaattttatcttttggcggtatgcacttttaacagtcaccccccaactaacacattattttcccct

SEQ ID NO: 82456 - DNA, 120 bp, Homo sapiens; identical to SEQ ID NO: 60288
  misc_feature: 372 for SV(C|O) and mtDNA

SEQ ID NO: 82457 - DNA, 120 bp, Homo sapiens
  misc_feature: 372 for SV(C|O) and mtDNA
tgatgtgagcccgtctaaacattttcagtgtattgctttgaggaggtaagctacataaactgtggggggtgtctttggggtttggttggttcggggtatggggttagcagcggtgtgtgt

SEQ ID NO: 82458 - DNA, 120 bp, Homo sapiens
  misc_feature: 372 for SV(C|O) and mtDNA
tccgaactagtctcaggcttcaacatcgaatacgccgcaggccccttcgccttattcttcatagccgaatacacaaacattattataataaacaccctcaccactacaatcttcctagga

SEQ ID NO: 82459 - DNA, 120 bp, Homo sapiens
  misc_feature: 372 for SV(C|O) and mtDNA
taaccatcttctccttacacctagcaggtgtctcctctatcttaggggccatcaacttcatcacaacaattatcaatataaaaccccctgccataacccaataccaaacgcccctcttcg

SEQ ID NO: 82460 - DNA, 120 bp, Homo sapiens
  misc_feature: 372 for SV(C|O) and mtDNA
gttaatcgtgtgaccgcggtggctggcacgaaattgaccaaccctggggttagtatagcttagttaaactttcgtttattgctaaaggttaatcactgctgtttcccgtgggggtgtggc

SEQ ID NO: 82461 - DNA, 120 bp, Homo sapiens
  misc_feature: 372 for SV(C|O) and mtDNA
agcacttaaacacatctctgccaaaccccaaaaacaaagaaccctaacaccagcctaaccagatttcaaattttatcttttggcggtatgcacttttaacagtcaccccccaactaacac

SEQ ID NO: 82462 - DNA, 120 bp, Homo sapiens
  misc_feature: 372 for SV(C|O) and mtDNA
gtgatgtgagcccgtctaaacattttcagtgtattgctttgaggaggtaagctacataaactgtggggggtgtctttggggtttggttggttcggggtatggggttagcagcggtgtgtg

SEQ ID NO: 82463 - DNA, 120 bp, Homo sapiens
  misc_feature: 372 for SV(C|O) and mtDNA
gtagacctaaccatcttctccttacacctagcaggtgtctcctctatcttaggggccatcaacttcatcacaacaattatcaatataaaaccccctgccataacccaataccaaacgccc

SEQ ID NO: 82464 - DNA, 120 bp, Homo sapiens
  misc_feature: 372 for SV(C|O) and mtDNA
gggggttttatattgataattgttgtgatgaagttgatggcccctaagatagaggagacacctgctaggtgtaaggagaagatggttaggtctacggaggctccagggtgggagtagttc

SEQ ID NO: 82465 - DNA, 120 bp, Homo sapiens
  misc_feature: 372 for SV(C|O) and mtDNA
gcagcaatgcagctcaaaacgcttagcctagccacacccccacgggaaacagcagtgattaacctttagcaataaacgaaagtttaactaagctatactaaccccagggttggtcaattt

SEQ ID NO: 82466 - DNA, 120 bp, Homo sapiens; identical to SEQ ID NO: 61292
  misc_feature: 372 for SV(C|O) and mtDNA

SEQ ID NO: 82467 - DNA, 120 bp, Homo sapiens
  misc_feature: 371 for SV(C|O) and mtDNA
gcacgcagcaatgcagctcaaaacgcttagcctagccacacccccacgggaaacagcagtgattaacctttagcaataaacgaaagtttaactaagctatactaaccccagggttggtca

SEQ ID NO: 82468 - DNA, 120 bp, Homo sapiens
  misc_feature: 371 for SV(C|O) and mtDNA
ctcaggcttcaacatcgaatacgccgcaggccccttcgccttattcttcatagccgaatacacaaacattattataataaacaccctcaccactacaatcttcctaggaacaacatatga

SEQ ID NO: 82469 - DNA, 120 bp, Homo sapiens
  misc_feature: 371 for SV(C|O) and mtDNA
accccaaagacaccccccacagtttatgtagcttacctcctcaaagcaatacactgaaaatgtttagacgggctcacatcaccccataaacaaataggtttggtcctagcctttctatta

SEQ ID NO: 82470 - DNA, 120 bp, Homo sapiens
  misc_feature: 371 for SV(C|O) and mtDNA
cagcacacacaccgctgctaaccccataccccgaaccaaccaaaccccaaagacaccccccacagtttatgtagcttacctcctcaaagcaatacactgaaaatgtttagacgggctcac

SEQ ID NO: 82471 - DNA, 120 bp, Homo sapiens
  misc_feature: 371 for SV(C|O) and mtDNA
gggagtgggaggggaaaataatgtgttagttggggggtgactgttaaaagtgcataccgccaaaagataaaatttgaaatctggttaggctggtgttagggttctttgtttttggggttt

SEQ ID NO: 82472 - DNA, 120 bp, Homo sapiens
  misc_feature: 371 for SV(C|O) and mtDNA
cgtagacctaaccatcttctccttacacctagcaggtgtctcctctatcttaggggccatcaacttcatcacaacaattatcaatataaaaccccctgccataacccaataccaaacgcc

SEQ ID NO: 82473 - DNA, 120 bp, Homo sapiens
  misc_feature: 371 for SV(C|O) and mtDNA
cttgggttaatcgtgtgaccgcggtggctggcacgaaattgaccaaccctggggttagtatagcttagttaaactttcgtttattgctaaaggttaatcactgctgtttcccgtgggggt

SEQ ID NO: 82474 - DNA, 120 bp, Homo sapiens
  misc_feature: 371 for SV(C|O) and mtDNA
cggggatgcttgcatgtgtaatcttactaagagctaatagaaaggctaggaccaaacctatttgtttatggggtgatgtgagcccgtctaaacattttcagtgtattgctttgaggaggt

SEQ ID NO: 82475 - DNA, 120 bp, Homo sapiens
  misc_feature: 370 for SV(C|O) and mtDNA
tgggttaatcgtgtgaccgcggtggctggcacgaaattgaccaaccctggggttagtatagcttagttaaactttcgtttattgctaaaggttaatcactgctgtttcccgtgggggtgt

SEQ ID NO: 82476 - DNA, 120 bp, Homo sapiens
  misc_feature: 370 for SV(C|O) and mtDNA
tccgtagacctaaccatcttctccttacacctagcaggtgtctcctctatcttaggggccatcaacttcatcacaacaattatcaatataaaaccccctgccataacccaataccaaacg

SEQ ID NO: 82477 - DNA, 120 bp, Homo sapiens
  misc_feature: 370 for SV(C|O) and mtDNA
acatcgaatacgccgcaggccccttcgccttattcttcatagccgaatacacaaacattattataataaacaccctcaccactacaatcttcctaggaacaacatatgacgcactctccc

SEQ ID NO: 82478 - DNA, 120 bp, Homo sapiens
  misc_feature: 370 for SV(C|O) and mtDNA
aacatcgaatacgccgcaggccccttcgccttattcttcatagccgaatacacaaacattattataataaacaccctcaccactacaatcttcctaggaacaacatatgacgcactctcc

SEQ ID NO: 82479 - DNA, 120 bp, Homo sapiens
  misc_feature: 370 for SV(C|O) and mtDNA
aaaggttaaaaaaagtaaaaggaactcggcaaatcttaccccgcctgtttaccaaaaacatcacctctagcatcaccagtattagaggcaccgcctgcccagtgacacatgtttaacggc

SEQ ID NO: 82480 - DNA, 120 bp, Homo sapiens
  misc_feature: 370 for SV(C|O) and mtDNA
cagcaatgcagctcaaaacgcttagcctagccacacccccacgggaaacagcagtgattaacctttagcaataaacgaaagtttaactaagctatactaaccccagggttggtcaatttc

SEQ ID NO: 82481 - DNA, 120 bp, Homo sapiens
  misc_feature: 370 for SV(C|O) and mtDNA
aatcgtgtgaccgcggtggctggcacgaaattgaccaaccctggggttagtatagcttagttaaactttcgtttattgctaaaggttaatcactgctgtttcccgtgggggtgtggctag

SEQ ID NO: 82482 - DNA, 120 bp, Homo sapiens; identical to SEQ ID NO: 60636
  misc_feature: 369 for SV(C|O) and mtDNA

SEQ ID NO: 82483 - DNA, 120 bp, Homo sapiens
  misc_feature: 369 for SV(C|O) and mtDNA
ggagcctccgtagacctaaccatcttctccttacacctagcaggtgtctcctctatcttaggggccatcaacttcatcacaacaattatcaatataaaaccccctgccataacccaatac

SEQ ID NO: 82484 - DNA, 120 bp, Homo sapiens
  misc_feature: 369 for SV(C|O) and mtDNA
ggaggggaaaataatgtgttagttggggggtgactgttaaaagtgcataccgccaaaagataaaatttgaaatctggttaggctggtgttagggttctttgtttttggggtttggcagag

SEQ ID NO: 82485 - DNA, 120 bp, Homo sapiens
  misc_feature: 369 for SV(C|O) and mtDNA
aatgcagctcaaaacgcttagcctagccacacccccacgggaaacagcagtgattaacctttagcaataaacgaaagtttaactaagctatactaaccccagggttggtcaatttcgtgc

SEQ ID NO: 82486 - DNA, 120 bp, Homo sapiens
  misc_feature: 369 for SV(C|O) and mtDNA
agcaatgcagctcaaaacgcttagcctagccacacccccacgggaaacagcagtgattaacctttagcaataaacgaaagtttaactaagctatactaaccccagggttggtcaatttcg

SEQ ID NO: 82487 - DNA, 120 bp, Homo sapiens
  misc_feature: 369 for SV(C|O) and mtDNA
atgcttgcatgtgtaatcttactaagagctaatagaaaggctaggaccaaacctatttgtttatggggtgatgtgagcccgtctaaacattttcagtgtattgctttgaggaggtaagct

SEQ ID NO: 82488 - DNA, 120 bp, Homo sapiens
  misc_feature: 368 for SV(C|O) and mtDNA
cagcacttaaacacatctctgccaaaccccaaaaacaaagaaccctaacaccagcctaaccagatttcaaattttatcttttggcggtatgcacttttaacagtcaccccccaactaaca

SEQ ID NO: 82489 - DNA, 120 bp, Homo sapiens
  misc_feature: 368 for SV(C|O) and mtDNA
ccagcacacacaccgctgctaaccccataccccgaaccaaccaaaccccaaagacaccccccacagtttatgtagcttacctcctcaaagcaatacactgaaaatgtttagacgggctca

SEQ ID NO: 82490 - DNA, 120 bp, Homo sapiens
  misc_feature: 368 for SV(C|O) and mtDNA
ggttatggcagggggttttatattgataattgttgtgatgaagttgatggcccctaagatagaggagacacctgctaggtgtaaggagaagatggttaggtctacggaggctccagggtg

SEQ ID NO: 82491 - DNA, 120 bp, Homo sapiens
  misc_feature: 368 for SV(C|O) and mtDNA
gggttaatcgtgtgaccgcggtggctggcacgaaattgaccaaccctggggttagtatagcttagttaaactttcgtttattgctaaaggttaatcactgctgtttcccgtgggggtgtg

SEQ ID NO: 82492 - DNA, 120 bp, Homo sapiens
  misc_feature: 368 for SV(C|O) and mtDNA
accacctacctccctcaccaaagcccataaaaataaaaaattataacaaaccctgagaaccaaaatgaacgaaaatctgttcgcttcattcattgcccccacaatcctaggcctacccgc

SEQ ID NO: 82493 - DNA, 120 bp, Homo sapiens
  misc_feature: 368 for SV(C|O) and mtDNA
gacctaaccatcttctccttacacctagcaggtgtctcctctatcttaggggccatcaacttcatcacaacaattatcaatataaaaccccctgccataacccaataccaaacgcccctc

SEQ ID NO: 82494 - DNA, 120 bp, Homo sapiens
  misc_feature: 368 for SV(C|O) and mtDNA
atcgtgtgaccgcggtggctggcacgaaattgaccaaccctggggttagtatagcttagttaaactttcgtttattgctaaaggttaatcactgctgtttcccgtgggggtgtggctagg

SEQ ID NO: 82495 - DNA, 120 bp, Homo sapiens
  misc_feature: 367 for SV(C|O) and mtDNA
tgcatgtgtaatcttactaagagctaatagaaaggctaggaccaaacctatttgtttatggggtgatgtgagcccgtctaaacattttcagtgtattgctttgaggaggtaagctacata

SEQ ID NO: 82496 - DNA, 120 bp, Homo sapiens
  misc_feature: 367 for SV(C|O) and mtDNA
tctctgccaaaccccaaaaacaaagaaccctaacaccagcctaaccagatttcaaattttatcttttggcggtatgcacttttaacagtcaccccccaactaacacattattttcccctc

SEQ ID NO: 82497 - DNA, 120 bp, Homo sapiens
  misc_feature: 367 for SV(C|O) and mtDNA
tcgtgtgaccgcggtggctggcacgaaattgaccaaccctggggttagtatagcttagttaaactttcgtttattgctaaaggttaatcactgctgtttcccgtgggggtgtggctaggc

SEQ ID NO: 82498 - DNA, 120 bp, Homo sapiens
  misc_feature: 367 for SV(C|O) and mtDNA
tcaggcttcaacatcgaatacgccgcaggccccttcgccttattcttcatagccgaatacacaaacattattataataaacaccctcaccactacaatcttcctaggaacaacatatgac

SEQ ID NO: 82499 - DNA, 120 bp, Homo sapiens
  misc_feature: 367 for SV(C|O) and mtDNA
ccgtagacctaaccatcttctccttacacctagcaggtgtctcctctatcttaggggccatcaacttcatcacaacaattatcaatataaaaccccctgccataacccaataccaaacgc

SEQ ID NO: 82500 - DNA, 120 bp, Homo sapiens; identical to SEQ ID NO: 60763
  misc_feature: 367 for SV(C|O) and mtDNA

SEQ ID NO: 82501 - DNA, 120 bp, Homo sapiens
  misc_feature: 367 for SV(C|O) and mtDNA
cccataaaaataaaaaattataacaaaccctgagaaccaaaatgaacgaaaatctgttcgcttcattcattgcccccacaatcctaggcctacccgccgcagtactgatcattctatttc

SEQ ID NO: 82502 - DNA, 120 bp, Homo sapiens
  misc_feature: 367 for SV(C|O) and mtDNA
aaaccccaaagacaccccccacagtttatgtagcttacctcctcaaagcaatacactgaaaatgtttagacgggctcacatcaccccataaacaaataggtttggtcctagcctttctat

SEQ ID NO: 82503 - DNA, 120 bp, Homo sapiens
  misc_feature: 366 for SV(C|O) and mtDNA
gggaggggaaaataatgtgttagttggggggtgactgttaaaagtgcataccgccaaaagataaaatttgaaatctggttaggctggtgttagggttctttgtttttggggtttggcaga

SEQ ID NO: 82504 - DNA, 120 bp, Homo sapiens
  misc_feature: 366 for SV(C|O) and mtDNA
gtaggcccctacgggctactacaacccttcgctgacgccataaaactcttcaccaaagagcccctaaaacccgccacatctaccatcaccctctacatcaccgccccgaccttagctctc

SEQ ID NO: 82505 - DNA, 120 bp, Homo sapiens
  misc_feature: 366 for SV(C|O) and mtDNA
ccccaaagacaccccccacagtttatgtagcttacctcctcaaagcaatacactgaaaatgtttagacgggctcacatcaccccataaacaaataggtttggtcctagcctttctattag

SEQ ID NO: 82506 - DNA, 120 bp, Homo sapiens
  misc_feature: 366 for SV(C|O) and mtDNA
caatgcagctcaaaacgcttagcctagccacacccccacgggaaacagcagtgattaacctttagcaataaacgaaagtttaactaagctatactaaccccagggttggtcaatttcgtg

SEQ ID NO: 82507 - DNA, 120 bp, Homo sapiens
  misc_feature: 366 for SV(C|O) and mtDNA
agacctaaccatcttctccttacacctagcaggtgtctcctctatcttaggggccatcaacttcatcacaacaattatcaatataaaaccccctgccataacccaataccaaacgcccct

SEQ ID NO: 82508 - DNA, 120 bp, Homo sapiens
  misc_feature: 366 for SV(C|O) and mtDNA
acctaaccatcttctccttacacctagcaggtgtctcctctatcttaggggccatcaacttcatcacaacaattatcaatataaaaccccctgccataacccaataccaaacgcccctct

SEQ ID NO: 82509 - DNA, 120 bp, Homo sapiens
  misc_feature: 365 for SV(C|O) and mtDNA
atgtgtaatcttactaagagctaatagaaaggctaggaccaaacctatttgtttatggggtgatgtgagcccgtctaaacattttcagtgtattgctttgaggaggtaagctacataaac

SEQ ID NO: 82510 - DNA, 120 bp, Homo sapiens
  misc_feature: 365 for SV(C|O) and mtDNA
gatgcttgcatgtgtaatcttactaagagctaatagaaaggctaggaccaaacctatttgtttatggggtgatgtgagcccgtctaaacattttcagtgtattgctttgaggaggtaagc

SEQ ID NO: 82511 - DNA, 120 bp, Homo sapiens
  misc_feature: 365 for SV(C|O) and mtDNA
ctaaccatcttctccttacacctagcaggtgtctcctctatcttaggggccatcaacttcatcacaacaattatcaatataaaaccccctgccataacccaataccaaacgcccctcttc

SEQ ID NO: 82512 - DNA, 120 bp, Homo sapiens
  misc_feature: 365 for SV(C|O) and mtDNA
caggcttcaacatcgaatacgccgcaggccccttcgccttattcttcatagccgaatacacaaacattattataataaacaccctcaccactacaatcttcctaggaacaacatatgacg

SEQ ID NO: 82513 - DNA, 120 bp, Homo sapiens
  misc_feature: 364 for SV(C|O) and mtDNA
ttgggttaatcgtgtgaccgcggtggctggcacgaaattgaccaaccctggggttagtatagcttagttaaactttcgtttattgctaaaggttaatcactgctgtttcccgtgggggtg

SEQ ID NO: 82514 - DNA, 120 bp, Homo sapiens
  misc_feature: 364 for SV(C|O) and mtDNA
ttgcatgtgtaatcttactaagagctaatagaaaggctaggaccaaacctatttgtttatggggtgatgtgagcccgtctaaacattttcagtgtattgctttgaggaggtaagctacat

SEQ ID NO: 82515 - DNA, 120 bp, Homo sapiens
  misc_feature: 364 for SV(C|O) and mtDNA
tagacctaaccatcttctccttacacctagcaggtgtctcctctatcttaggggccatcaacttcatcacaacaattatcaatataaaaccccctgccataacccaataccaaacgcccc

SEQ ID NO: 82516 - DNA, 120 bp, Homo sapiens
  misc_feature: 364 for SV(C|O) and mtDNA
aggcccctacgggctactacaacccttcgctgacgccataaaactcttcaccaaagagcccctaaaacccgccacatctaccatcaccctctacatcaccgccccgaccttagctctcac

SEQ ID NO: 82517 - DNA, 120 bp, Homo sapiens
  misc_feature: 364 for SV(C|O) and mtDNA
ggttaatcgtgtgaccgcggtggctggcacgaaattgaccaaccctggggttagtatagcttagttaaactttcgtttattgctaaaggttaatcactgctgtttcccgtgggggtgtgg

SEQ ID NO: 82518 - DNA, 120 bp, Homo sapiens
  misc_feature: 364 for SV(C|O) and mtDNA
atgcagctcaaaacgcttagcctagccacacccccacgggaaacagcagtgattaacctttagcaataaacgaaagtttaactaagctatactaaccccagggttggtcaatttcgtgcc

SEQ ID NO: 82519 - DNA, 120 bp, Homo sapiens
  misc_feature: 364 for SV(C|O) and mtDNA
ggagtgggaggggaaaataatgtgttagttggggggtgactgttaaaagtgcataccgccaaaagataaaatttgaaatctggttaggctggtgttagggttctttgtttttggggtttg

SEQ ID NO: 82520 - DNA, 120 bp, Homo sapiens
  misc_feature: 364 for SV(C|O) and mtDNA
aacccaacacaggcatgctcataaggaaaggttaaaaaaagtaaaaggaactcggcaaatcttaccccgcctgtttaccaaaaacatcacctctagcatcaccagtattagaggcaccgc

SEQ ID NO: 82521 - DNA, 120 bp, Homo sapiens; identical to SEQ ID NO: 60713
  misc_feature: 364 for SV(C|O) and mtDNA

SEQ ID NO: 82522 - DNA, 120 bp, Homo sapiens
  misc_feature: 364 for SV(C|O) and mtDNA
aaccccaaagacaccccccacagtttatgtagcttacctcctcaaagcaatacactgaaaatgtttagacgggctcacatcaccccataaacaaataggtttggtcctagcctttctatt

SEQ ID NO: 82523 - DNA, 120 bp, Homo sapiens
  misc_feature: 363 for SV(C|O) and mtDNA
gcatgtgtaatcttactaagagctaatagaaaggctaggaccaaacctatttgtttatggggtgatgtgagcccgtctaaacattttcagtgtattgctttgaggaggtaagctacataa

SEQ ID NO: 82524 - DNA, 120 bp, Homo sapiens
  misc_feature: 363 for SV(C|O) and mtDNA
tgggagtgggaggggaaaataatgtgttagttggggggtgactgttaaaagtgcataccgccaaaagataaaatttgaaatctggttaggctggtgttagggttctttgtttttggggtt

SEQ ID NO: 82525 - DNA, 120 bp, Homo sapiens
  misc_feature: 363 for SV(C|O) and mtDNA
taggcccctacgggctactacaacccttcgctgacgccataaaactcttcaccaaagagcccctaaaacccgccacatctaccatcaccctctacatcaccgccccgaccttagctctca

SEQ ID NO: 82526 - DNA, 120 bp, Homo sapiens
  misc_feature: 363 for SV(C|O) and mtDNA
ctccgtagacctaaccatcttctccttacacctagcaggtgtctcctctatcttaggggccatcaacttcatcacaacaattatcaatataaaaccccctgccataacccaataccaaac

SEQ ID NO: 82527 - DNA, 120 bp, Homo sapiens
  misc_feature: 363 for SV(C|O) and mtDNA
acagcacttaaacacatctctgccaaaccccaaaaacaaagaaccctaacaccagcctaaccagatttcaaattttatcttttggcggtatgcacttttaacagtcaccccccaactaac

SEQ ID NO: 82528 - DNA, 120 bp, Homo sapiens
  misc_feature: 363 for SV(C|O) and mtDNA
gcttgcatgtgtaatcttactaagagctaatagaaaggctaggaccaaacctatttgtttatggggtgatgtgagcccgtctaaacattttcagtgtattgctttgaggaggtaagctac

SEQ ID NO: 82529 - DNA, 120 bp, Homo sapiens
  misc_feature: 363 for SV(C|O) and mtDNA
acccaacacaggcatgctcataaggaaaggttaaaaaaagtaaaaggaactcggcaaatcttaccccgcctgtttaccaaaaacatcacctctagcatcaccagtattagaggcaccgcc

SEQ ID NO: 82530 - DNA, 120 bp, Homo sapiens
  misc_feature: 363 for SV(C|O) and mtDNA
gcaatgcagctcaaaacgcttagcctagccacacccccacgggaaacagcagtgattaacctttagcaataaacgaaagtttaactaagctatactaaccccagggttggtcaatttcgt

SEQ ID NO: 82531 - DNA, 120 bp, Homo sapiens
  misc_feature: 363 for SV(C|O) and mtDNA
cctaaccatcttctccttacacctagcaggtgtctcctctatcttaggggccatcaacttcatcacaacaattatcaatataaaaccccctgccataacccaataccaaacgcccctctt

SEQ ID NO: 82532 - DNA, 120 bp, Homo sapiens
  misc_feature: 363 for SV(C|O) and mtDNA
cagggggttttatattgataattgttgtgatgaagttgatggcccctaagatagaggagacacctgctaggtgtaaggagaagatggttaggtctacggaggctccagggtgggagtagt

SEQ ID NO: 82533 - DNA, 120 bp, Homo sapiens
  misc_feature: 362 for SV(C|O) and mtDNA
catgtgtaatcttactaagagctaatagaaaggctaggaccaaacctatttgtttatggggtgatgtgagcccgtctaaacattttcagtgtattgctttgaggaggtaagctacataaa

SEQ ID NO: 82534 - DNA, 120 bp, Homo sapiens
  misc_feature: 362 for SV(C|O) and mtDNA
ttcaacatcgaatacgccgcaggccccttcgccttattcttcatagccgaatacacaaacattattataataaacaccctcaccactacaatcttcctaggaacaacatatgacgcactc

SEQ ID NO: 82535 - DNA, 120 bp, Homo sapiens
  misc_feature: 362 for SV(C|O) and mtDNA
gtgggaggggaaaataatgtgttagttggggggtgactgttaaaagtgcataccgccaaaagataaaatttgaaatctggttaggctggtgttagggttctttgtttttggggtttggca

SEQ ID NO: 82536 - DNA, 120 bp, Homo sapiens
  misc_feature: 362 for SV(C|O) and mtDNA
tatgggagtgggaggggaaaataatgtgttagttggggggtgactgttaaaagtgcataccgccaaaagataaaatttgaaatctggttaggctggtgttagggttctttgtttttgggg

SEQ ID NO: 82537 - DNA, 120 bp, Homo sapiens
  misc_feature: 361 for SV(C|O) and mtDNA
cctccgtagacctaaccatcttctccttacacctagcaggtgtctcctctatcttaggggccatcaacttcatcacaacaattatcaatataaaaccccctgccataacccaataccaaa

SEQ ID NO: 82538 - DNA, 120 bp, Homo sapiens
  misc_feature: 361 for SV(C|O) and mtDNA
caacatcgaatacgccgcaggccccttcgccttattcttcatagccgaatacacaaacattattataataaacaccctcaccactacaatcttcctaggaacaacatatgacgcactctc

SEQ ID NO: 82539 - DNA, 120 bp, Homo sapiens
  misc_feature: 361 for SV(C|O) and mtDNA
atgggagtgggaggggaaaataatgtgttagttggggggtgactgttaaaagtgcataccgccaaaagataaaatttgaaatctggttaggctggtgttagggttctttgtttttggggt

SEQ ID NO: 82540 - DNA, 120 bp, Homo sapiens
  misc_feature: 360 for SV(C|O) and mtDNA
cttgcatgtgtaatcttactaagagctaatagaaaggctaggaccaaacctatttgtttatggggtgatgtgagcccgtctaaacattttcagtgtattgctttgaggaggtaagctaca

SEQ ID NO: 82541 - DNA, 120 bp, Homo sapiens; identical to SEQ ID NO: 60590
  misc_feature: 360 for SV(C|O) and mtDNA

SEQ ID NO: 82542 - DNA, 120 bp, Homo sapiens
  misc_feature: 360 for SV(C|O) and mtDNA
gttatggcagggggttttatattgataattgttgtgatgaagttgatggcccctaagatagaggagacacctgctaggtgtaaggagaagatggttaggtctacggaggctccagggtgg

SEQ ID NO: 82543 - DNA, 120 bp, Homo sapiens
  misc_feature: 360 for SV(C|O) and mtDNA
ggaaaggttaaaaaaagtaaaaggaactcggcaaatcttaccccgcctgtttaccaaaaacatcacctctagcatcaccagtattagaggcaccgcctgcccagtgacacatgtttaacg

SEQ ID NO: 82544 - DNA, 120 bp, Homo sapiens
  misc_feature: 360 for SV(C|O) and mtDNA
gaaaggttaaaaaaagtaaaaggaactcggcaaatcttaccccgcctgtttaccaaaaacatcacctctagcatcaccagtattagaggcaccgcctgcccagtgacacatgtttaacgg

SEQ ID NO: 82545 - DNA, 120 bp, Homo sapiens
  misc_feature: 359 for SV(C|O) and mtDNA
ttagtagtatgggagtgggaggggaaaataatgtgttagttggggggtgactgttaaaagtgcataccgccaaaagataaaatttgaaatctggttaggctggtgttagggttctttgtt

SEQ ID NO: 82546 - DNA, 120 bp, Homo sapiens
  misc_feature: 359 for SV(C|O) and mtDNA
tgcagctcaaaacgcttagcctagccacacccccacgggaaacagcagtgattaacctttagcaataaacgaaagtttaactaagctatactaaccccagggttggtcaatttcgtgcca

SEQ ID NO: 82547 - DNA, 120 bp, Homo sapiens
  misc_feature: 359 for SV(C|O) and mtDNA
tcaacatcgaatacgccgcaggccccttcgccttattcttcatagccgaatacacaaacattattataataaacaccctcaccactacaatcttcctaggaacaacatatgacgcactct

SEQ ID NO: 82548 - DNA, 120 bp, Homo sapiens
  misc_feature: 359 for SV(C|O) and mtDNA
aacacaggcatgctcataaggaaaggttaaaaaaagtaaaaggaactcggcaaatcttaccccgcctgtttaccaaaaacatcacctctagcatcaccagtattagaggcaccgcctgcc

SEQ ID NO: 82549 - DNA, 120 bp, Homo sapiens
  misc_feature: 359 for SV(C|O) and mtDNA
caacacaggcatgctcataaggaaaggttaaaaaaagtaaaaggaactcggcaaatcttaccccgcctgtttaccaaaaacatcacctctagcatcaccagtattagaggcaccgcctgc

SEQ ID NO: 82550 - DNA, 120 bp, Homo sapiens
  misc_feature: 359 for SV(C|O) and mtDNA
cgtgtgaccgcggtggctggcacgaaattgaccaaccctggggttagtatagcttagttaaactttcgtttattgctaaaggttaatcactgctgtttcccgtgggggtgtggctaggct

SEQ ID NO: 82551 - DNA, 120 bp, Homo sapiens
  misc_feature: 359 for SV(C|O) and mtDNA
aggcatgctcataaggaaaggttaaaaaaagtaaaaggaactcggcaaatcttaccccgcctgtttaccaaaaacatcacctctagcatcaccagtattagaggcaccgcctgcccagtg

SEQ ID NO: 82552 - DNA, 120 bp, Homo sapiens
  misc_feature: 359 for SV(C|O) and mtDNA
aaagacaccccccacagtttatgtagcttacctcctcaaagcaatacactgaaaatgtttagacgggctcacatcaccccataaacaaataggtttggtcctagcctttctattagctct

SEQ ID NO: 82553 - DNA, 120 bp, Homo sapiens
  misc_feature: 358 for SV(C|O) and mtDNA
cacagcacttaaacacatctctgccaaaccccaaaaacaaagaaccctaacaccagcctaaccagatttcaaattttatcttttggcggtatgcacttttaacagtcaccccccaactaa

SEQ ID NO: 82554 - DNA, 120 bp, Homo sapiens
  misc_feature: 358 for SV(C|O) and mtDNA
gtgtgaccgcggtggctggcacgaaattgaccaaccctggggttagtatagcttagttaaactttcgtttattgctaaaggttaatcactgctgtttcccgtgggggtgtggctaggcta

SEQ ID NO: 82555 - DNA, 120 bp, Homo sapiens
  misc_feature: 358 for SV(C|O) and mtDNA
gtagtatgggagtgggaggggaaaataatgtgttagttggggggtgactgttaaaagtgcataccgccaaaagataaaatttgaaatctggttaggctggtgttagggttctttgttttt

SEQ ID NO: 82556 - DNA, 120 bp, Homo sapiens
  misc_feature: 358 for SV(C|O) and mtDNA
cccagcacacacaccgctgctaaccccataccccgaaccaaccaaaccccaaagacaccccccacagtttatgtagcttacctcctcaaagcaatacactgaaaatgtttagacgggctc

SEQ ID NO: 82557 - DNA, 120 bp, Homo sapiens
  misc_feature: 358 for SV(C|O) and mtDNA
cttcaacatcgaatacgccgcaggccccttcgccttattcttcatagccgaatacacaaacattattataataaacaccctcaccactacaatcttcctaggaacaacatatgacgcact

SEQ ID NO: 82558 - DNA, 120 bp, Homo sapiens
  misc_feature: 357 for SV(C|O) and mtDNA
ttatggcagggggttttatattgataattgttgtgatgaagttgatggcccctaagatagaggagacacctgctaggtgtaaggagaagatggttaggtctacggaggctccagggtggg

SEQ ID NO: 82559 - DNA, 120 bp, Homo sapiens
  misc_feature: 357 for SV(C|O) and mtDNA
tgtgaccgcggtggctggcacgaaattgaccaaccctggggttagtatagcttagttaaactttcgtttattgctaaaggttaatcactgctgtttcccgtgggggtgtggctaggctaa

SEQ ID NO: 82560 - DNA, 120 bp, Homo sapiens
  misc_feature: 357 for SV(C|O) and mtDNA
agcctccgtagacctaaccatcttctccttacacctagcaggtgtctcctctatcttaggggccatcaacttcatcacaacaattatcaatataaaaccccctgccataacccaatacca

SEQ ID NO: 82561 - DNA, 120 bp, Homo sapiens
  misc_feature: 357 for SV(C|O) and mtDNA
tagtagtatgggagtgggaggggaaaataatgtgttagttggggggtgactgttaaaagtgcataccgccaaaagataaaatttgaaatctggttaggctggtgttagggttctttgttt

SEQ ID NO: 82562 - DNA, 120 bp, Homo sapiens
  misc_feature: 357 for SV(C|O) and mtDNA
ccacctacctccctcaccaaagcccataaaaataaaaaattataacaaaccctgagaaccaaaatgaacgaaaatctgttcgcttcattcattgcccccacaatcctaggcctacccgcc

SEQ ID NO: 82563 - DNA, 120 bp, Homo sapiens
  misc_feature: 357 for SV(C|O) and mtDNA
cctacgggctactacaacccttcgctgacgccataaaactcttcaccaaagagcccctaaaacccgccacatctaccatcaccctctacatcaccgccccgaccttagctctcaccatcg

SEQ ID NO: 82564 - DNA, 120 bp, Homo sapiens
  misc_feature: 357 for SV(C|O) and mtDNA
agtagtatgggagtgggaggggaaaataatgtgttagttggggggtgactgttaaaagtgcataccgccaaaagataaaatttgaaatctggttaggctggtgttagggttctttgtttt

SEQ ID NO: 82565 - DNA, 120 bp, Homo sapiens
  misc_feature: 356 for SV(C|O) and mtDNA
taaggaaaggttaaaaaaagtaaaaggaactcggcaaatcttaccccgcctgtttaccaaaaacatcacctctagcatcaccagtattagaggcaccgcctgcccagtgacacatgttta

SEQ ID NO: 82566 - DNA, 120 bp, Homo sapiens
  misc_feature: 356 for SV(C|O) and mtDNA
aggaaaggttaaaaaaagtaaaaggaactcggcaaatcttaccccgcctgtttaccaaaaacatcacctctagcatcaccagtattagaggcaccgcctgcccagtgacacatgtttaac

SEQ ID NO: 82567 - DNA, 120 bp, Homo sapiens
  misc_feature: 356 for SV(C|O) and mtDNA
ggcccctacgggctactacaacccttcgctgacgccataaaactcttcaccaaagagcccctaaaacccgccacatctaccatcaccctctacatcaccgccccgaccttagctctcacc

SEQ ID NO: 82568 - DNA, 120 bp, Homo sapiens
  misc_feature: 356 for SV(C|O) and mtDNA
aggcttcaacatcgaatacgccgcaggccccttcgccttattcttcatagccgaatacacaaacattattataataaacaccctcaccactacaatcttcctaggaacaacatatgacgc

SEQ ID NO: 82569 - DNA, 120 bp, Homo sapiens
  misc_feature: 356 for SV(C|O) and mtDNA
gcagggggttttatattgataattgttgtgatgaagttgatggcccctaagatagaggagacacctgctaggtgtaaggagaagatggttaggtctacggaggctccagggtgggagtag

SEQ ID NO: 82570 - DNA, 120 bp, Homo sapiens
  misc_feature: 356 for SV(C|O) and mtDNA
acaggcatgctcataaggaaaggttaaaaaaagtaaaaggaactcggcaaatcttaccccgcctgtttaccaaaaacatcacctctagcatcaccagtattagaggcaccgcctgcccag

SEQ ID NO: 82571 - DNA, 120 bp, Homo sapiens
  misc_feature: 355 for SV(C|O) and mtDNA
aaggaaaggttaaaaaaagtaaaaggaactcggcaaatcttaccccgcctgtttaccaaaaacatcacctctagcatcaccagtattagaggcaccgcctgcccagtgacacatgtttaa

SEQ ID NO: 82572 - DNA, 120 bp, Homo sapiens
  misc_feature: 355 for SV(C|O) and mtDNA
gcccctacgggctactacaacccttcgctgacgccataaaactcttcaccaaagagcccctaaaacccgccacatctaccatcaccctctacatcaccgccccgaccttagctctcacca

SEQ ID NO: 82573 - DNA, 120 bp, Homo sapiens
  misc_feature: 355 for SV(C|O) and mtDNA
tgggaggggaaaataatgtgttagttggggggtgactgttaaaagtgcataccgccaaaagataaaatttgaaatctggttaggctggtgttagggttctttgtttttggggtttggcag

SEQ ID NO: 82574 - DNA, 120 bp, Homo sapiens
  misc_feature: 355 for SV(C|O) and mtDNA
tatggcagggggttttatattgataattgttgtgatgaagttgatggcccctaagatagaggagacacctgctaggtgtaaggagaagatggttaggtctacggaggctccagggtggga

SEQ ID NO: 82575 - DNA, 120 bp, Homo sapiens; identical to SEQ ID NO: 59492
  misc_feature: 355 for SV(C|O) and mtDNA

SEQ ID NO: 82576 - DNA, 120 bp, Homo sapiens
  misc_feature: 355 for SV(C|O) and mtDNA
ggcagggggttttatattgataattgttgtgatgaagttgatggcccctaagatagaggagacacctgctaggtgtaaggagaagatggttaggtctacggaggctccagggtgggagta

SEQ ID NO: 82577 - DNA, 120 bp, Homo sapiens
  misc_feature: 355 for SV(C|O) and mtDNA
gtgaccgcggtggctggcacgaaattgaccaaccctggggttagtatagcttagttaaactttcgtttattgctaaaggttaatcactgctgtttcccgtgggggtgtggctaggctaag

SEQ ID NO: 82578 - DNA, 120 bp, Homo sapiens
  misc_feature: 355 for SV(C|O) and mtDNA
gagcctccgtagacctaaccatcttctccttacacctagcaggtgtctcctctatcttaggggccatcaacttcatcacaacaattatcaatataaaaccccctgccataacccaatacc

SEQ ID NO: 82579 - DNA, 120 bp, Homo sapiens
  misc_feature: 355 for SV(C|O) and mtDNA
atggcagggggttttatattgataattgttgtgatgaagttgatggcccctaagatagaggagacacctgctaggtgtaaggagaagatggttaggtctacggaggctccagggtgggag

SEQ ID NO: 82580 - DNA, 120 bp, Homo sapiens
  misc_feature: 355 for SV(C|O) and mtDNA
cccaacacaggcatgctcataaggaaaggttaaaaaaagtaaaaggaactcggcaaatcttaccccgcctgtttaccaaaaacatcacctctagcatcaccagtattagaggcaccgcct

SEQ ID NO: 82581 - DNA, 120 bp, Homo sapiens
  misc_feature: 355 for SV(C|O) and mtDNA
caggcatgctcataaggaaaggttaaaaaaagtaaaaggaactcggcaaatcttaccccgcctgtttaccaaaaacatcacctctagcatcaccagtattagaggcaccgcctgcccagt

SEQ ID NO: 82582 - DNA, 120 bp, Homo sapiens
  misc_feature: 354 for SV(C|O) and mtDNA
tgtgtaatcttactaagagctaatagaaaggctaggaccaaacctatttgtttatggggtgatgtgagcccgtctaaacattttcagtgtattgctttgaggaggtaagctacataaact

SEQ ID NO: 82583 - DNA, 120 bp, Homo sapiens
  misc_feature: 354 for SV(C|O) and mtDNA
tgtaatcttactaagagctaatagaaaggctaggaccaaacctatttgtttatggggtgatgtgagcccgtctaaacattttcagtgtattgctttgaggaggtaagctacataaactgt

SEQ ID NO: 82584 - DNA, 120 bp, Homo sapiens
  misc_feature: 354 for SV(C|O) and mtDNA
tggcagggggttttatattgataattgttgtgatgaagttgatggcccctaagatagaggagacacctgctaggtgtaaggagaagatggttaggtctacggaggctccagggtgggagt

SEQ ID NO: 82585 - DNA, 120 bp, Homo sapiens
  misc_feature: 354 for SV(C|O) and mtDNA
ggcttcaacatcgaatacgccgcaggccccttcgccttattcttcatagccgaatacacaaacattattataataaacaccctcaccactacaatcttcctaggaacaacatatgacgca

SEQ ID NO: 82586 - DNA, 120 bp, Homo sapiens
  misc_feature: 354 for SV(C|O) and mtDNA
taatcttactaagagctaatagaaaggctaggaccaaacctatttgtttatggggtgatgtgagcccgtctaaacattttcagtgtattgctttgaggaggtaagctacataaactgtgg

SEQ ID NO: 82587 - DNA, 120 bp, Homo sapiens
  misc_feature: 354 for SV(C|O) and mtDNA
gcccataaaaataaaaaattataacaaaccctgagaaccaaaatgaacgaaaatctgttcgcttcattcattgcccccacaatcctaggcctacccgccgcagtactgatcattctattt

SEQ ID NO: 82588 - DNA, 120 bp, Homo sapiens
  misc_feature: 354 for SV(C|O) and mtDNA
gagtgggaggggaaaataatgtgttagttggggggtgactgttaaaagtgcataccgccaaaagataaaatttgaaatctggttaggctggtgttagggttctttgtttttggggtttgg

SEQ ID NO: 82589 - DNA, 120 bp, Homo sapiens
  misc_feature: 354 for SV(C|O) and mtDNA
acccagcacacacaccgctgctaaccccataccccgaaccaaccaaaccccaaagacaccccccacagtttatgtagcttacctcctcaaagcaatacactgaaaatgtttagacgggct

SEQ ID NO: 82590 - DNA, 120 bp, Homo sapiens
  misc_feature: 353 for SV(C|O) and mtDNA
gcctccgtagacctaaccatcttctccttacacctagcaggtgtctcctctatcttaggggccatcaacttcatcacaacaattatcaatataaaaccccctgccataacccaataccaa

SEQ ID NO: 82591 - DNA, 120 bp, Homo sapiens
  misc_feature: 353 for SV(C|O) and mtDNA
cacaggcatgctcataaggaaaggttaaaaaaagtaaaaggaactcggcaaatcttaccccgcctgtttaccaaaaacatcacctctagcatcaccagtattagaggcaccgcctgccca

SEQ ID NO: 82592 - DNA, 120 bp, Homo sapiens
  misc_feature: 353 for SV(C|O) and mtDNA
tgaccgcggtggctggcacgaaattgaccaaccctggggttagtatagcttagttaaactttcgtttattgctaaaggttaatcactgctgtttcccgtgggggtgtggctaggctaagc

SEQ ID NO: 82593 - DNA, 120 bp, Homo sapiens
  misc_feature: 353 for SV(C|O) and mtDNA
gtgtaatcttactaagagctaatagaaaggctaggaccaaacctatttgtttatggggtgatgtgagcccgtctaaacattttcagtgtattgctttgaggaggtaagctacataaactg

SEQ ID NO: 82594 - DNA, 120 bp, Homo sapiens
  misc_feature: 353 for SV(C|O) and mtDNA
gcttcaacatcgaatacgccgcaggccccttcgccttattcttcatagccgaatacacaaacattattataataaacaccctcaccactacaatcttcctaggaacaacatatgacgcac

SEQ ID NO: 82595 - DNA, 120 bp, Homo sapiens
  misc_feature: 353 for SV(C|O) and mtDNA
cccaaagacaccccccacagtttatgtagcttacctcctcaaagcaatacactgaaaatgtttagacgggctcacatcaccccataaacaaataggtttggtcctagcctttctattagc

SEQ ID NO: 82596 - DNA, 120 bp, Homo sapiens
  misc_feature: 353 for SV(C|O) and mtDNA
ccaacacaggcatgctcataaggaaaggttaaaaaaagtaaaaggaactcggcaaatcttaccccgcctgtttaccaaaaacatcacctctagcatcaccagtattagaggcaccgcctg

SEQ ID NO: 82597 - DNA, 120 bp, Homo sapiens
  misc_feature: 352 for SV(C|O) and mtDNA
gtaatcttactaagagctaatagaaaggctaggaccaaacctatttgtttatggggtgatgtgagcccgtctaaacattttcagtgtattgctttgaggaggtaagctacataaactgtg

SEQ ID NO: 82598 - DNA, 120 bp, Homo sapiens
  misc_feature: 352 for SV(C|O) and mtDNA
aagcccataaaaataaaaaattataacaaaccctgagaaccaaaatgaacgaaaatctgttcgcttcattcattgcccccacaatcctaggcctacccgccgcagtactgatcattctat

SEQ ID NO: 82599 - DNA, 120 bp, Homo sapiens
  misc_feature: 351 for SV(C|O) and mtDNA
gtatgggagtgggaggggaaaataatgtgttagttggggggtgactgttaaaagtgcataccgccaaaagataaaatttgaaatctggttaggctggtgttagggttctttgtttttggg

SEQ ID NO: 82600 - DNA, 120 bp, Homo sapiens
  misc_feature: 351 for SV(C|O) and mtDNA
ctacgggctactacaacccttcgctgacgccataaaactcttcaccaaagagcccctaaaacccgccacatctaccatcaccctctacatcaccgccccgaccttagctctcaccatcgc

SEQ ID NO: 82601 - DNA, 120 bp, Homo sapiens
  misc_feature: 351 for SV(C|O) and mtDNA
agtgggaggggaaaataatgtgttagttggggggtgactgttaaaagtgcataccgccaaaagataaaatttgaaatctggttaggctggtgttagggttctttgtttttggggtttggc

SEQ ID NO: 82602 - DNA, 120 bp, Homo sapiens; identical to SEQ ID NO: 59689
  misc_feature: 350 for SV(C|O) and mtDNA

SEQ ID NO: 82603 - DNA, 120 bp, Homo sapiens
  misc_feature: 350 for SV(C|O) and mtDNA
ataaactgtggggggtgtctttggggtttggttggttcggggtatggggttagcagcggtgtgtgtgctgggtaggatgggcgggggttgtattgatgagattagtagtatgggagtggg

SEQ ID NO: 82604 - DNA, 120 bp, Homo sapiens
  misc_feature: 350 for SV(C|O) and mtDNA
aatcttactaagagctaatagaaaggctaggaccaaacctatttgtttatggggtgatgtgagcccgtctaaacattttcagtgtattgctttgaggaggtaagctacataaactgtggg

SEQ ID NO: 82605 - DNA, 120 bp, Homo sapiens
  misc_feature: 349 for SV(C|O) and mtDNA
aaagcccataaaaataaaaaattataacaaaccctgagaaccaaaatgaacgaaaatctgttcgcttcattcattgcccccacaatcctaggcctacccgccgcagtactgatcattcta

SEQ ID NO: 82606 - DNA, 120 bp, Homo sapiens; identical to SEQ ID NO: 59855
  misc_feature: 349 for SV(C|O) and mtDNA

SEQ ID NO: 82607 - DNA, 120 bp, Homo sapiens
  misc_feature: 349 for SV(C|O) and mtDNA
acctacctccctcaccaaagcccataaaaataaaaaattataacaaaccctgagaaccaaaatgaacgaaaatctgttcgcttcattcattgcccccacaatcctaggcctacccgccgc

SEQ ID NO: 82608 - DNA, 120 bp, Homo sapiens
  misc_feature: 349 for SV(C|O) and mtDNA
cttactaagagctaatagaaaggctaggaccaaacctatttgtttatggggtgatgtgagcccgtctaaacattttcagtgtattgctttgaggaggtaagctacataaactgtgggggg

SEQ ID NO: 82609 - DNA, 120 bp, Homo sapiens
  misc_feature: 349 for SV(C|O) and mtDNA
acataaactgtggggggtgtctttggggtttggttggttcggggtatggggttagcagcggtgtgtgtgctgggtaggatgggcgggggttgtattgatgagattagtagtatgggagtg

SEQ ID NO: 82610 - DNA, 120 bp, Homo sapiens
  misc_feature: 349 for SV(C|O) and mtDNA
ataaggaaaggttaaaaaaagtaaaaggaactcggcaaatcttaccccgcctgtttaccaaaaacatcacctctagcatcaccagtattagaggcaccgcctgcccagtgacacatgttt

SEQ ID NO: 82611 - DNA, 120 bp, Homo sapiens; identical to SEQ ID NO: 60138
  misc_feature: 348 for SV(C|O) and mtDNA

SEQ ID NO: 82612 - DNA, 120 bp, Homo sapiens
  misc_feature: 347 for SV(C|O) and mtDNA
tcttactaagagctaatagaaaggctaggaccaaacctatttgtttatggggtgatgtgagcccgtctaaacattttcagtgtattgctttgaggaggtaagctacataaactgtggggg

SEQ ID NO: 82613 - DNA, 120 bp, Homo sapiens
  misc_feature: 347 for SV(C|O) and mtDNA
ggaggtaagctacataaactgtggggggtgtctttggggtttggttggttcggggtatggggttagcagcggtgtgtgtgctgggtaggatgggcgggggttgtattgatgagattagta

SEQ ID NO: 82614 - DNA, 120 bp, Homo sapiens
  misc_feature: 347 for SV(C|O) and mtDNA
acacaggcatgctcataaggaaaggttaaaaaaagtaaaaggaactcggcaaatcttaccccgcctgtttaccaaaaacatcacctctagcatcaccagtattagaggcaccgcctgccc

SEQ ID NO: 82615 - DNA, 120 bp, Homo sapiens
  misc_feature: 347 for SV(C|O) and mtDNA
gaggtaagctacataaactgtggggggtgtctttggggtttggttggttcggggtatggggttagcagcggtgtgtgtgctgggtaggatgggcgggggttgtattgatgagattagtag

SEQ ID NO: 82616 - DNA, 120 bp, Homo sapiens
  misc_feature: 347 for SV(C|O) and mtDNA
cccctacgggctactacaacccttcgctgacgccataaaactcttcaccaaagagcccctaaaacccgccacatctaccatcaccctctacatcaccgccccgaccttagctctcaccat

SEQ ID NO: 82617 - DNA, 120 bp, Homo sapiens
  misc_feature: 347 for SV(C|O) and mtDNA
atcttactaagagctaatagaaaggctaggaccaaacctatttgtttatggggtgatgtgagcccgtctaaacattttcagtgtattgctttgaggaggtaagctacataaactgtgggg

SEQ ID NO: 82618 - DNA, 120 bp, Homo sapiens
  misc_feature: 347 for SV(C|O) and mtDNA
ccaaagacaccccccacagtttatgtagcttacctcctcaaagcaatacactgaaaatgtttagacgggctcacatcaccccataaacaaataggtttggtcctagcctttctattagct

SEQ ID NO: 82619 - DNA, 120 bp, Homo sapiens
  misc_feature: 347 for SV(C|O) and mtDNA
aggtaagctacataaactgtggggggtgtctttggggtttggttggttcggggtatggggttagcagcggtgtgtgtgctgggtaggatgggcgggggttgtattgatgagattagtagt

SEQ ID NO: 82620 - DNA, 120 bp, Homo sapiens
  misc_feature: 346 for SV(C|O) and mtDNA
tagtatgggagtgggaggggaaaataatgtgttagttggggggtgactgttaaaagtgcataccgccaaaagataaaatttgaaatctggttaggctggtgttagggttctttgtttttg

SEQ ID NO: 82621 - DNA, 120 bp, Homo sapiens
  misc_feature: 346 for SV(C|O) and mtDNA
tacataaactgtggggggtgtctttggggtttggttggttcggggtatggggttagcagcggtgtgtgtgctgggtaggatgggcgggggttgtattgatgagattagtagtatgggagt

SEQ ID NO: 82622 - DNA, 120 bp, Homo sapiens
  misc_feature: 346 for SV(C|O) and mtDNA
gccacagcacttaaacacatctctgccaaaccccaaaaacaaagaaccctaacaccagcctaaccagatttcaaattttatcttttggcggtatgcacttttaacagtcaccccccaact

SEQ ID NO: 82623 - DNA, 120 bp, Homo sapiens
  misc_feature: 346 for SV(C|O) and mtDNA
gcagctcaaaacgcttagcctagccacacccccacgggaaacagcagtgattaacctttagcaataaacgaaagtttaactaagctatactaaccccagggttggtcaatttcgtgccag

SEQ ID NO: 82624 - DNA, 120 bp, Homo sapiens; identical to SEQ ID NO: 59671
  misc_feature: 346 for SV(C|O) and mtDNA

SEQ ID NO: 82625 - DNA, 120 bp, Homo sapiens
  misc_feature: 346 for SV(C|O) and mtDNA
agtatgggagtgggaggggaaaataatgtgttagttggggggtgactgttaaaagtgcataccgccaaaagataaaatttgaaatctggttaggctggtgttagggttctttgtttttgg

SEQ ID NO: 82626 - DNA, 120 bp, Homo sapiens
  misc_feature: 346 for SV(C|O) and mtDNA
aagacaccccccacagtttatgtagcttacctcctcaaagcaatacactgaaaatgtttagacgggctcacatcaccccataaacaaataggtttggtcctagcctttctattagctctt

SEQ ID NO: 82627 - DNA, 120 bp, Homo sapiens
  misc_feature: 345 for SV(C|O) and mtDNA
taaactgtggggggtgtctttggggtttggttggttcggggtatggggttagcagcggtgtgtgtgctgggtaggatgggcgggggttgtattgatgagattagtagtatgggagtggga

SEQ ID NO: 82628 - DNA, 120 bp, Homo sapiens
  misc_feature: 345 for SV(C|O) and mtDNA
ccctacgggctactacaacccttcgctgacgccataaaactcttcaccaaagagcccctaaaacccgccacatctaccatcaccctctacatcaccgccccgaccttagctctcaccatc

SEQ ID NO: 82629 - DNA, 120 bp, Homo sapiens
  misc_feature: 345 for SV(C|O) and mtDNA
cataaactgtggggggtgtctttggggtttggttggttcggggtatggggttagcagcggtgtgtgtgctgggtaggatgggcgggggttgtattgatgagattagtagtatgggagtgg

SEQ ID NO: 82630 - DNA, 120 bp, Homo sapiens
  misc_feature: 345 for SV(C|O) and mtDNA
agcccataaaaataaaaaattataacaaaccctgagaaccaaaatgaacgaaaatctgttcgcttcattcattgcccccacaatcctaggcctacccgccgcagtactgatcattctatt

SEQ ID NO: 82631 - DNA, 120 bp, Homo sapiens
  misc_feature: 344 for SV(C|O) and mtDNA
gctacataaactgtggggggtgtctttggggtttggttggttcggggtatggggttagcagcggtgtgtgtgctgggtaggatgggcgggggttgtattgatgagattagtagtatggga

SEQ ID NO: 82632 - DNA, 120 bp, Homo sapiens
  misc_feature: 344 for SV(C|O) and mtDNA
ccacagcacttaaacacatctctgccaaaccccaaaaacaaagaaccctaacaccagcctaaccagatttcaaattttatcttttggcggtatgcacttttaacagtcaccccccaacta

SEQ ID NO: 82633 - DNA, 120 bp, Homo sapiens
  misc_feature: 344 for SV(C|O) and mtDNA
tacccagcacacacaccgctgctaaccccataccccgaaccaaccaaaccccaaagacaccccccacagtttatgtagcttacctcctcaaagcaatacactgaaaatgtttagacgggc

SEQ ID NO: 82634 - DNA, 120 bp, Homo sapiens
  misc_feature: 344 for SV(C|O) and mtDNA
taagctacataaactgtggggggtgtctttggggtttggttggttcggggtatggggttagcagcggtgtgtgtgctgggtaggatgggcgggggttgtattgatgagattagtagtatg

SEQ ID NO: 82635 - DNA, 120 bp, Homo sapiens
  misc_feature: 344 for SV(C|O) and mtDNA
agacaccccccacagtttatgtagcttacctcctcaaagcaatacactgaaaatgtttagacgggctcacatcaccccataaacaaataggtttggtcctagcctttctattagctctta

SEQ ID NO: 82636 - DNA, 120 bp, Homo sapiens
  misc_feature: 344 for SV(C|O) and mtDNA
gtaagctacataaactgtggggggtgtctttggggtttggttggttcggggtatggggttagcagcggtgtgtgtgctgggtaggatgggcgggggttgtattgatgagattagtagtat

SEQ ID NO: 82637 - DNA, 120 bp, Homo sapiens
  misc_feature: 344 for SV(C|O) and mtDNA
caaagacaccccccacagtttatgtagcttacctcctcaaagcaatacactgaaaatgtttagacgggctcacatcaccccataaacaaataggtttggtcctagcctttctattagctc

SEQ ID NO: 82638 - DNA, 120 bp, Homo sapiens
  misc_feature: 344 for SV(C|O) and mtDNA
aaactgtggggggtgtctttggggtttggttggttcggggtatggggttagcagcggtgtgtgtgctgggtaggatgggcgggggttgtattgatgagattagtagtatgggagtgggag

SEQ ID NO: 82639 - DNA, 120 bp, Homo sapiens
  misc_feature: 344 for SV(C|O) and mtDNA
agctacataaactgtggggggtgtctttggggtttggttggttcggggtatggggttagcagcggtgtgtgtgctgggtaggatgggcgggggttgtattgatgagattagtagtatggg

SEQ ID NO: 82640 - DNA, 120 bp, Homo sapiens
  misc_feature: 344 for SV(C|O) and mtDNA
agattagtagtatgggagtgggaggggaaaataatgtgttagttggggggtgactgttaaaagtgcataccgccaaaagataaaatttgaaatctggttaggctggtgttagggttcttt

SEQ ID NO: 82641 - DNA, 120 bp, Homo sapiens
  misc_feature: 343 for SV(C|O) and mtDNA
cctacctccctcaccaaagcccataaaaataaaaaattataacaaaccctgagaaccaaaatgaacgaaaatctgttcgcttcattcattgcccccacaatcctaggcctacccgccgca

SEQ ID NO: 82642 - DNA, 120 bp, Homo sapiens
  misc_feature: 343 for SV(C|O) and mtDNA
ggcatgctcataaggaaaggttaaaaaaagtaaaaggaactcggcaaatcttaccccgcctgtttaccaaaaacatcacctctagcatcaccagtattagaggcaccgcctgcccagtga

SEQ ID NO: 82643 - DNA, 120 bp, Homo sapiens
  misc_feature: 343 for SV(C|O) and mtDNA
gattagtagtatgggagtgggaggggaaaataatgtgttagttggggggtgactgttaaaagtgcataccgccaaaagataaaatttgaaatctggttaggctggtgttagggttctttg

SEQ ID NO: 82644 - DNA, 120 bp, Homo sapiens; identical to SEQ ID NO: 59574
  misc_feature: 342 for SV(C|O) and mtDNA

SEQ ID NO: 82645 - DNA, 120 bp, Homo sapiens; identical to SEQ ID NO: 59173
  misc_feature: 342 for SV(C|O) and mtDNA

SEQ ID NO: 82646 - DNA, 120 bp, Homo sapiens
  misc_feature: 342 for SV(C|O) and mtDNA
gaccgcggtggctggcacgaaattgaccaaccctggggttagtatagcttagttaaactttcgtttattgctaaaggttaatcactgctgtttcccgtgggggtgtggctaggctaagcg

SEQ ID NO: 82647 - DNA, 120 bp, Homo sapiens
  misc_feature: 341 for SV(C|O) and mtDNA
ggccacagcacttaaacacatctctgccaaaccccaaaaacaaagaaccctaacaccagcctaaccagatttcaaattttatcttttggcggtatgcacttttaacagtcaccccccaac

SEQ ID NO: 82648 - DNA, 120 bp, Homo sapiens
  misc_feature: 341 for SV(C|O) and mtDNA
gcatgctcataaggaaaggttaaaaaaagtaaaaggaactcggcaaatcttaccccgcctgtttaccaaaaacatcacctctagcatcaccagtattagaggcaccgcctgcccagtgac

SEQ ID NO: 82649 - DNA, 120 bp, Homo sapiens
  misc_feature: 341 for SV(C|O) and mtDNA
ctcataaggaaaggttaaaaaaagtaaaaggaactcggcaaatcttaccccgcctgtttaccaaaaacatcacctctagcatcaccagtattagaggcaccgcctgcccagtgacacatg

SEQ ID NO: 82650 - DNA, 120 bp, Homo sapiens
  misc_feature: 340 for SV(C|O) and mtDNA
ttctggccacagcacttaaacacatctctgccaaaccccaaaaacaaagaaccctaacaccagcctaaccagatttcaaattttatcttttggcggtatgcacttttaacagtcaccccc

SEQ ID NO: 82651 - DNA, 120 bp, Homo sapiens
  misc_feature: 340 for SV(C|O) and mtDNA
ggtaagctacataaactgtggggggtgtctttggggtttggttggttcggggtatggggttagcagcggtgtgtgtgctgggtaggatgggcgggggttgtattgatgagattagtagta

SEQ ID NO: 82652 - DNA, 120 bp, Homo sapiens
  misc_feature: 340 for SV(C|O) and mtDNA
gaggaggtaagctacataaactgtggggggtgtctttggggtttggttggttcggggtatggggttagcagcggtgtgtgtgctgggtaggatgggcgggggttgtattgatgagattag

SEQ ID NO: 82653 - DNA, 120 bp, Homo sapiens
  misc_feature: 340 for SV(C|O) and mtDNA
ctacataaactgtggggggtgtctttggggtttggttggttcggggtatggggttagcagcggtgtgtgtgctgggtaggatgggcgggggttgtattgatgagattagtagtatgggag

SEQ ID NO: 82654 - DNA, 120 bp, Homo sapiens
  misc_feature: 340 for SV(C|O) and mtDNA
aagctacataaactgtggggggtgtctttggggtttggttggttcggggtatggggttagcagcggtgtgtgtgctgggtaggatgggcgggggttgtattgatgagattagtagtatgg

SEQ ID NO: 82655 - DNA, 120 bp, Homo sapiens
  misc_feature: 340 for SV(C|O) and mtDNA
cataaggaaaggttaaaaaaagtaaaaggaactcggcaaatcttaccccgcctgtttaccaaaaacatcacctctagcatcaccagtattagaggcaccgcctgcccagtgacacatgtt

SEQ ID NO: 82656 - DNA, 120 bp, Homo sapiens
  misc_feature: 339 for SV(C|O) and mtDNA
gctcataaggaaaggttaaaaaaagtaaaaggaactcggcaaatcttaccccgcctgtttaccaaaaacatcacctctagcatcaccagtattagaggcaccgcctgcccagtgacacat

SEQ ID NO: 82657 - DNA, 120 bp, Homo sapiens
  misc_feature: 339 for SV(C|O) and mtDNA
ctacctccctcaccaaagcccataaaaataaaaaattataacaaaccctgagaaccaaaatgaacgaaaatctgttcgcttcattcattgcccccacaatcctaggcctacccgccgcag

SEQ ID NO: 82658 - DNA, 120 bp, Homo sapiens
  misc_feature: 339 for SV(C|O) and mtDNA
cacctacctccctcaccaaagcccataaaaataaaaaattataacaaaccctgagaaccaaaatgaacgaaaatctgttcgcttcattcattgcccccacaatcctaggcctacccgccg

SEQ ID NO: 82659 - DNA, 120 bp, Homo sapiens
  misc_feature: 337 for SV(C|O) and mtDNA
tacgggctactacaacccttcgctgacgccataaaactcttcaccaaagagcccctaaaacccgccacatctaccatcaccctctacatcaccgccccgaccttagctctcaccatcgct

SEQ ID NO: 82660 - DNA, 120 bp, Homo sapiens
  misc_feature: 337 for SV(C|O) and mtDNA
tacctccctcaccaaagcccataaaaataaaaaattataacaaaccctgagaaccaaaatgaacgaaaatctgttcgcttcattcattgcccccacaatcctaggcctacccgccgcagt

SEQ ID NO: 82661 - DNA, 120 bp, Homo sapiens
  misc_feature: 337 for SV(C|O) and mtDNA
attagtagtatgggagtgggaggggaaaataatgtgttagttggggggtgactgttaaaagtgcataccgccaaaagataaaatttgaaatctggttaggctggtgttagggttctttgt

SEQ ID NO: 82662 - DNA, 120 bp, Homo sapiens
  misc_feature: 336 for SV(C|O) and mtDNA
tggccacagcacttaaacacatctctgccaaaccccaaaaacaaagaaccctaacaccagcctaaccagatttcaaattttatcttttggcggtatgcacttttaacagtcaccccccaa

SEQ ID NO: 82663 - DNA, 120 bp, Homo sapiens
  misc_feature: 336 for SV(C|O) and mtDNA
ctggccacagcacttaaacacatctctgccaaaccccaaaaacaaagaaccctaacaccagcctaaccagatttcaaattttatcttttggcggtatgcacttttaacagtcacccccca

SEQ ID NO: 82664 - DNA, 120 bp, Homo sapiens
  misc_feature: 336 for SV(C|O) and mtDNA
tcataaggaaaggttaaaaaaagtaaaaggaactcggcaaatcttaccccgcctgtttaccaaaaacatcacctctagcatcaccagtattagaggcaccgcctgcccagtgacacatgt

SEQ ID NO: 82665 - DNA, 120 bp, Homo sapiens
  misc_feature: 336 for SV(C|O) and mtDNA
gagattagtagtatgggagtgggaggggaaaataatgtgttagttggggggtgactgttaaaagtgcataccgccaaaagataaaatttgaaatctggttaggctggtgttagggttctt

SEQ ID NO: 82666 - DNA, 120 bp, Homo sapiens
  misc_feature: 336 for SV(C|O) and mtDNA
cgcggtggctggcacgaaattgaccaaccctggggttagtatagcttagttaaactttcgtttattgctaaaggttaatcactgctgtttcccgtgggggtgtggctaggctaagcgttt

SEQ ID NO: 82667 - DNA, 120 bp, Homo sapiens
  misc_feature: 336 for SV(C|O) and mtDNA
cctcccactcccatactactaatctcatcaatacaacccccgcccatcctacccagcacacacaccgctgctaaccccataccccgaaccaaccaaaccccaaagacaccccccacagtt

SEQ ID NO: 82668 - DNA, 120 bp, Homo sapiens
  misc_feature: 336 for SV(C|O) and mtDNA
ccgcggtggctggcacgaaattgaccaaccctggggttagtatagcttagttaaactttcgtttattgctaaaggttaatcactgctgtttcccgtgggggtgtggctaggctaagcgtt

SEQ ID NO: 82669 - DNA, 120 bp, Homo sapiens
  misc_feature: 336 for SV(C|O) and mtDNA
aggaggtaagctacataaactgtggggggtgtctttggggtttggttggttcggggtatggggttagcagcggtgtgtgtgctgggtaggatgggcgggggttgtattgatgagattagt

SEQ ID NO: 82670 - DNA, 120 bp, Homo sapiens
  misc_feature: 336 for SV(C|O) and mtDNA
acaccccccacagtttatgtagcttacctcctcaaagcaatacactgaaaatgtttagacgggctcacatcaccccataaacaaataggtttggtcctagcctttctattagctcttagt

SEQ ID NO: 82671 - DNA, 120 bp, Homo sapiens
  misc_feature: 336 for SV(C|O) and mtDNA
accgcggtggctggcacgaaattgaccaaccctggggttagtatagcttagttaaactttcgtttattgctaaaggttaatcactgctgtttcccgtgggggtgtggctaggctaagcgt

SEQ ID NO: 82672 - DNA, 120 bp, Homo sapiens
  misc_feature: 335 for SV(C|O) and mtDNA
tctggccacagcacttaaacacatctctgccaaaccccaaaaacaaagaaccctaacaccagcctaaccagatttcaaattttatcttttggcggtatgcacttttaacagtcacccccc

SEQ ID NO: 82673 - DNA, 120 bp, Homo sapiens
  misc_feature: 335 for SV(C|O) and mtDNA
atgctcataaggaaaggttaaaaaaagtaaaaggaactcggcaaatcttaccccgcctgtttaccaaaaacatcacctctagcatcaccagtattagaggcaccgcctgcccagtgacac

SEQ ID NO: 82674 - DNA, 120 bp, Homo sapiens
  misc_feature: 335 for SV(C|O) and mtDNA
caaagcccataaaaataaaaaattataacaaaccctgagaaccaaaatgaacgaaaatctgttcgcttcattcattgcccccacaatcctaggcctacccgccgcagtactgatcattct

SEQ ID NO: 82675 - DNA, 120 bp, Homo sapiens
  misc_feature: 334 for SV(C|O) and mtDNA
acgggctactacaacccttcgctgacgccataaaactcttcaccaaagagcccctaaaacccgccacatctaccatcaccctctacatcaccgccccgaccttagctctcaccatcgctc

SEQ ID NO: 82676 - DNA, 120 bp, Homo sapiens
  misc_feature: 333 for SV(C|O) and mtDNA
tgagattagtagtatgggagtgggaggggaaaataatgtgttagttggggggtgactgttaaaagtgcataccgccaaaagataaaatttgaaatctggttaggctggtgttagggttct

SEQ ID NO: 82677 - DNA, 120 bp, Homo sapiens
  misc_feature: 333 for SV(C|O) and mtDNA
tactaagagctaatagaaaggctaggaccaaacctatttgtttatggggtgatgtgagcccgtctaaacattttcagtgtattgctttgaggaggtaagctacataaactgtggggggtg

SEQ ID NO: 82678 - DNA, 120 bp, Homo sapiens
  misc_feature: 333 for SV(C|O) and mtDNA
gacaccccccacagtttatgtagcttacctcctcaaagcaatacactgaaaatgtttagacgggctcacatcaccccataaacaaataggtttggtcctagcctttctattagctcttag

SEQ ID NO: 82679 - DNA, 120 bp, Homo sapiens
  misc_feature: 332 for SV(C|O) and mtDNA
atctcatcaatacaacccccgcccatcctacccagcacacacaccgctgctaaccccataccccgaaccaaccaaaccccaaagacaccccccacagtttatgtagcttacctcctcaaa

SEQ ID NO: 82680 - DNA, 120 bp, Homo sapiens
  misc_feature: 332 for SV(C|O) and mtDNA
ttactaagagctaatagaaaggctaggaccaaacctatttgtttatggggtgatgtgagcccgtctaaacattttcagtgtattgctttgaggaggtaagctacataaactgtggggggt

SEQ ID NO: 82681 - DNA, 120 bp, Homo sapiens
  misc_feature: 332 for SV(C|O) and mtDNA
tgctcataaggaaaggttaaaaaaagtaaaaggaactcggcaaatcttaccccgcctgtttaccaaaaacatcacctctagcatcaccagtattagaggcaccgcctgcccagtgacaca

SEQ ID NO: 82682 - DNA, 120 bp, Homo sapiens
  misc_feature: 332 for SV(C|O) and mtDNA
accctaacaccagcctaaccagatttcaaattttatcttttggcggtatgcacttttaacagtcaccccccaactaacacattattttcccctcccactcccatactactaatctcatca

SEQ ID NO: 82683 - DNA, 120 bp, Homo sapiens
  misc_feature: 332 for SV(C|O) and mtDNA
gatgagattagtagtatgggagtgggaggggaaaataatgtgttagttggggggtgactgttaaaagtgcataccgccaaaagataaaatttgaaatctggttaggctggtgttagggtt

SEQ ID NO: 82684 - DNA, 120 bp, Homo sapiens
  misc_feature: 332 for SV(C|O) and mtDNA
cccctcccactcccatactactaatctcatcaatacaacccccgcccatcctacccagcacacacaccgctgctaaccccataccccgaaccaaccaaaccccaaagacaccccccacag

SEQ ID NO: 82685 - DNA, 120 bp, Homo sapiens
  misc_feature: 332 for SV(C|O) and mtDNA
ctacccagcacacacaccgctgctaaccccataccccgaaccaaccaaaccccaaagacaccccccacagtttatgtagcttacctcctcaaagcaatacactgaaaatgtttagacggg

SEQ ID NO: 82686 - DNA, 120 bp, Homo sapiens
  misc_feature: 331 for SV(C|O) and mtDNA
ttttcccctcccactcccatactactaatctcatcaatacaacccccgcccatcctacccagcacacacaccgctgctaaccccataccccgaaccaaccaaaccccaaagacacccccc

SEQ ID NO: 82687 - DNA, 120 bp, Homo sapiens
  misc_feature: 331 for SV(C|O) and mtDNA
aatctcatcaatacaacccccgcccatcctacccagcacacacaccgctgctaaccccataccccgaaccaaccaaaccccaaagacaccccccacagtttatgtagcttacctcctcaa

SEQ ID NO: 82688 - DNA, 120 bp, Homo sapiens
  misc_feature: 331 for SV(C|O) and mtDNA
atgagattagtagtatgggagtgggaggggaaaataatgtgttagttggggggtgactgttaaaagtgcataccgccaaaagataaaatttgaaatctggttaggctggtgttagggttc

SEQ ID NO: 82689 - DNA, 120 bp, Homo sapiens
  misc_feature: 330 for SV(C|O) and mtDNA
catgctcataaggaaaggttaaaaaaagtaaaaggaactcggcaaatcttaccccgcctgtttaccaaaaacatcacctctagcatcaccagtattagaggcaccgcctgcccagtgaca

SEQ ID NO: 82690 - DNA, 120 bp, Homo sapiens
  misc_feature: 330 for SV(C|O) and mtDNA
tgaggaggtaagctacataaactgtggggggtgtctttggggtttggttggttcggggtatggggttagcagcggtgtgtgtgctgggtaggatgggcgggggttgtattgatgagatta

SEQ ID NO: 82691 - DNA, 120 bp, Homo sapiens
  misc_feature: 330 for SV(C|O) and mtDNA
tctcatcaatacaacccccgcccatcctacccagcacacacaccgctgctaaccccataccccgaaccaaccaaaccccaaagacaccccccacagtttatgtagcttacctcctcaaag

SEQ ID NO: 82692 - DNA, 120 bp, Homo sapiens
  misc_feature: 330 for SV(C|O) and mtDNA
tattttcccctcccactcccatactactaatctcatcaatacaacccccgcccatcctacccagcacacacaccgctgctaaccccataccccgaaccaaccaaaccccaaagacacccc

SEQ ID NO: 82693 - DNA, 120 bp, Homo sapiens
  misc_feature: 330 for SV(C|O) and mtDNA
ccctcccactcccatactactaatctcatcaatacaacccccgcccatcctacccagcacacacaccgctgctaaccccataccccgaaccaaccaaaccccaaagacaccccccacagt

SEQ ID NO: 82694 - DNA, 120 bp, Homo sapiens
  misc_feature: 329 for SV(C|O) and mtDNA
acctccctcaccaaagcccataaaaataaaaaattataacaaaccctgagaaccaaaatgaacgaaaatctgttcgcttcattcattgcccccacaatcctaggcctacccgccgcagta

SEQ ID NO: 82695 - DNA, 120 bp, Homo sapiens
  misc_feature: 329 for SV(C|O) and mtDNA
cgggctactacaacccttcgctgacgccataaaactcttcaccaaagagcccctaaaacccgccacatctaccatcaccctctacatcaccgccccgaccttagctctcaccatcgctct

SEQ ID NO: 82696 - DNA, 120 bp, Homo sapiens
  misc_feature: 329 for SV(C|O) and mtDNA
cccgcccatcctacccagcacacacaccgctgctaaccccataccccgaaccaaccaaaccccaaagacaccccccacagtttatgtagcttacctcctcaaagcaatacactgaaaatg

SEQ ID NO: 82697 - DNA, 120 bp, Homo sapiens
  misc_feature: 328 for SV(C|O) and mtDNA
ccctcaccaaagcccataaaaataaaaaattataacaaaccctgagaaccaaaatgaacgaaaatctgttcgcttcattcattgcccccacaatcctaggcctacccgccgcagtactga

SEQ ID NO: 82698 - DNA, 120 bp, Homo sapiens
  misc_feature: 328 for SV(C|O) and mtDNA
cttctggccacagcacttaaacacatctctgccaaaccccaaaaacaaagaaccctaacaccagcctaaccagatttcaaattttatcttttggcggtatgcacttttaacagtcacccc

SEQ ID NO: 82699 - DNA, 120 bp, Homo sapiens
  misc_feature: 328 for SV(C|O) and mtDNA
attttcccctcccactcccatactactaatctcatcaatacaacccccgcccatcctacccagcacacacaccgctgctaaccccataccccgaaccaaccaaaccccaaagacaccccc

SEQ ID NO: 82700 - DNA, 120 bp, Homo sapiens
  misc_feature: 328 for SV(C|O) and mtDNA
gggctactacaacccttcgctgacgccataaaactcttcaccaaagagcccctaaaacccgccacatctaccatcaccctctacatcaccgccccgaccttagctctcaccatcgctctt

SEQ ID NO: 82701 - DNA, 120 bp, Homo sapiens
  misc_feature: 328 for SV(C|O) and mtDNA
ctcatcaatacaacccccgcccatcctacccagcacacacaccgctgctaaccccataccccgaaccaaccaaaccccaaagacaccccccacagtttatgtagcttacctcctcaaagc

SEQ ID NO: 82702 - DNA, 120 bp, Homo sapiens
  misc_feature: 327 for SV(C|O) and mtDNA
ttattttcccctcccactcccatactactaatctcatcaatacaacccccgcccatcctacccagcacacacaccgctgctaaccccataccccgaaccaaccaaaccccaaagacaccc

SEQ ID NO: 82703 - DNA, 120 bp, Homo sapiens
  misc_feature: 327 for SV(C|O) and mtDNA
accaaagcccataaaaataaaaaattataacaaaccctgagaaccaaaatgaacgaaaatctgttcgcttcattcattgcccccacaatcctaggcctacccgccgcagtactgatcatt

SEQ ID NO: 82704 - DNA, 120 bp, Homo sapiens
  misc_feature: 326 for SV(C|O) and mtDNA
cccccgcccatcctacccagcacacacaccgctgctaaccccataccccgaaccaaccaaaccccaaagacaccccccacagtttatgtagcttacctcctcaaagcaatacactgaaaa

SEQ ID NO: 82705 - DNA, 120 bp, Homo sapiens
  misc_feature: 326 for SV(C|O) and mtDNA
cctcaccaaagcccataaaaataaaaaattataacaaaccctgagaaccaaaatgaacgaaaatctgttcgcttcattcattgcccccacaatcctaggcctacccgccgcagtactgat

SEQ ID NO: 82706 - DNA, 120 bp, Homo sapiens
  misc_feature: 325 for SV(C|O) and mtDNA
ttcccctcccactcccatactactaatctcatcaatacaacccccgcccatcctacccagcacacacaccgctgctaaccccataccccgaaccaaccaaaccccaaagacaccccccac

SEQ ID NO: 82707 - DNA, 120 bp, Homo sapiens
  misc_feature: 325 for SV(C|O) and mtDNA
gcttctggccacagcacttaaacacatctctgccaaaccccaaaaacaaagaaccctaacaccagcctaaccagatttcaaattttatcttttggcggtatgcacttttaacagtcaccc

SEQ ID NO: 82708 - DNA, 120 bp, Homo sapiens
  misc_feature: 325 for SV(C|O) and mtDNA
ggctactacaacccttcgctgacgccataaaactcttcaccaaagagcccctaaaacccgccacatctaccatcaccctctacatcaccgccccgaccttagctctcaccatcgctcttc

SEQ ID NO: 82709 - DNA, 120 bp, Homo sapiens
  misc_feature: 325 for SV(C|O) and mtDNA
cctacccagcacacacaccgctgctaaccccataccccgaaccaaccaaaccccaaagacaccccccacagtttatgtagcttacctcctcaaagcaatacactgaaaatgtttagacgg

SEQ ID NO: 82710 - DNA, 120 bp, Homo sapiens
  misc_feature: 324 for SV(C|O) and mtDNA
ccctaacaccagcctaaccagatttcaaattttatcttttggcggtatgcacttttaacagtcaccccccaactaacacattattttcccctcccactcccatactactaatctcatcaa

SEQ ID NO: 82711 - DNA, 120 bp, Homo sapiens
  misc_feature: 324 for SV(C|O) and mtDNA
caacccccgcccatcctacccagcacacacaccgctgctaaccccataccccgaaccaaccaaaccccaaagacaccccccacagtttatgtagcttacctcctcaaagcaatacactga

SEQ ID NO: 82712 - DNA, 120 bp, Homo sapiens
  misc_feature: 324 for SV(C|O) and mtDNA
ccaaagcccataaaaataaaaaattataacaaaccctgagaaccaaaatgaacgaaaatctgttcgcttcattcattgcccccacaatcctaggcctacccgccgcagtactgatcattc

SEQ ID NO: 82713 - DNA, 120 bp, Homo sapiens
  misc_feature: 323 for SV(C|O) and mtDNA
acccccgcccatcctacccagcacacacaccgctgctaaccccataccccgaaccaaccaaaccccaaagacaccccccacagtttatgtagcttacctcctcaaagcaatacactgaaa

SEQ ID NO: 82714 - DNA, 120 bp, Homo sapiens
  misc_feature: 323 for SV(C|O) and mtDNA
tcccctcccactcccatactactaatctcatcaatacaacccccgcccatcctacccagcacacacaccgctgctaaccccataccccgaaccaaccaaaccccaaagacaccccccaca

SEQ ID NO: 82715 - DNA, 120 bp, Homo sapiens
  misc_feature: 323 for SV(C|O) and mtDNA
tcatcaatacaacccccgcccatcctacccagcacacacaccgctgctaaccccataccccgaaccaaccaaaccccaaagacaccccccacagtttatgtagcttacctcctcaaagca

SEQ ID NO: 82716 - DNA, 120 bp, Homo sapiens
  misc_feature: 323 for SV(C|O) and mtDNA
atcctacccagcacacacaccgctgctaaccccataccccgaaccaaccaaaccccaaagacaccccccacagtttatgtagcttacctcctcaaagcaatacactgaaaatgtttagac

SEQ ID NO: 82717 - DNA, 120 bp, Homo sapiens
  misc_feature: 323 for SV(C|O) and mtDNA
cctccctcaccaaagcccataaaaataaaaaattataacaaaccctgagaaccaaaatgaacgaaaatctgttcgcttcattcattgcccccacaatcctaggcctacccgccgcagtac

SEQ ID NO: 82718 - DNA, 120 bp, Homo sapiens
  misc_feature: 322 for SV(C|O) and mtDNA
acaccagcctaaccagatttcaaattttatcttttggcggtatgcacttttaacagtcaccccccaactaacacattattttcccctcccactcccatactactaatctcatcaatacaa

SEQ ID NO: 82719 - DNA, 120 bp, Homo sapiens
  misc_feature: 322 for SV(C|O) and mtDNA
aacccccgcccatcctacccagcacacacaccgctgctaaccccataccccgaaccaaccaaaccccaaagacaccccccacagtttatgtagcttacctcctcaaagcaatacactgaa

SEQ ID NO: 82720 - DNA, 120 bp, Homo sapiens
  misc_feature: 322 for SV(C|O) and mtDNA
aacaccagcctaaccagatttcaaattttatcttttggcggtatgcacttttaacagtcaccccccaactaacacattattttcccctcccactcccatactactaatctcatcaataca

SEQ ID NO: 82721 - DNA, 120 bp, Homo sapiens
  misc_feature: 322 for SV(C|O) and mtDNA
tcctacccagcacacacaccgctgctaaccccataccccgaaccaaccaaaccccaaagacaccccccacagtttatgtagcttacctcctcaaagcaatacactgaaaatgtttagacg

SEQ ID NO: 82722 - DNA, 120 bp, Homo sapiens
  misc_feature: 322 for SV(C|O) and mtDNA
tccctcaccaaagcccataaaaataaaaaattataacaaaccctgagaaccaaaatgaacgaaaatctgttcgcttcattcattgcccccacaatcctaggcctacccgccgcagtactg

SEQ ID NO: 82723 - DNA, 120 bp, Homo sapiens
  misc_feature: 322 for SV(C|O) and mtDNA
ccgcccatcctacccagcacacacaccgctgctaaccccataccccgaaccaaccaaaccccaaagacaccccccacagtttatgtagcttacctcctcaaagcaatacactgaaaatgt

SEQ ID NO: 82724 - DNA, 120 bp, Homo sapiens
  misc_feature: 321 for SV(C|O) and mtDNA
aatacaacccccgcccatcctacccagcacacacaccgctgctaaccccataccccgaaccaaccaaaccccaaagacaccccccacagtttatgtagcttacctcctcaaagcaataca

SEQ ID NO: 82725 - DNA, 120 bp, Homo sapiens
  misc_feature: 321 for SV(C|O) and mtDNA
atacaacccccgcccatcctacccagcacacacaccgctgctaaccccataccccgaaccaaccaaaccccaaagacaccccccacagtttatgtagcttacctcctcaaagcaatacac

SEQ ID NO: 82726 - DNA, 120 bp, Homo sapiens
  misc_feature: 321 for SV(C|O) and mtDNA
ccccgcccatcctacccagcacacacaccgctgctaaccccataccccgaaccaaccaaaccccaaagacaccccccacagtttatgtagcttacctcctcaaagcaatacactgaaaat

SEQ ID NO: 82727 - DNA, 120 bp, Homo sapiens
  misc_feature: 320 for SV(C|O) and mtDNA
caatacaacccccgcccatcctacccagcacacacaccgctgctaaccccataccccgaaccaaccaaaccccaaagacaccccccacagtttatgtagcttacctcctcaaagcaatac

SEQ ID NO: 82728 - DNA, 120 bp, Homo sapiens
  misc_feature: 319 for SV(C|O) and mtDNA
tttcccctcccactcccatactactaatctcatcaatacaacccccgcccatcctacccagcacacacaccgctgctaaccccataccccgaaccaaccaaaccccaaagacacccccca

SEQ ID NO: 82729 - DNA, 120 bp, Homo sapiens
  misc_feature: 319 for SV(C|O) and mtDNA
tacaacccccgcccatcctacccagcacacacaccgctgctaaccccataccccgaaccaaccaaaccccaaagacaccccccacagtttatgtagcttacctcctcaaagcaatacact

SEQ ID NO: 82730 - DNA, 120 bp, Homo sapiens
  misc_feature: 319 for SV(C|O) and mtDNA
attattttcccctcccactcccatactactaatctcatcaatacaacccccgcccatcctacccagcacacacaccgctgctaaccccataccccgaaccaaccaaaccccaaagacacc

SEQ ID NO: 82731 - DNA, 120 bp, Homo sapiens
  misc_feature: 319 for SV(C|O) and mtDNA
ctcaccaaagcccataaaaataaaaaattataacaaaccctgagaaccaaaatgaacgaaaatctgttcgcttcattcattgcccccacaatcctaggcctacccgccgcagtactgatc

SEQ ID NO: 82732 - DNA, 120 bp, Homo sapiens
  misc_feature: 318 for SV(C|O) and mtDNA
ctccctcaccaaagcccataaaaataaaaaattataacaaaccctgagaaccaaaatgaacgaaaatctgttcgcttcattcattgcccccacaatcctaggcctacccgccgcagtact

SEQ ID NO: 82733 - DNA, 120 bp, Homo sapiens
  misc_feature: 318 for SV(C|O) and mtDNA
acaacccccgcccatcctacccagcacacacaccgctgctaaccccataccccgaaccaaccaaaccccaaagacaccccccacagtttatgtagcttacctcctcaaagcaatacactg

SEQ ID NO: 82734 - DNA, 120 bp, Homo sapiens
  misc_feature: 317 for SV(C|O) and mtDNA
catcaatacaacccccgcccatcctacccagcacacacaccgctgctaaccccataccccgaaccaaccaaaccccaaagacaccccccacagtttatgtagcttacctcctcaaagcaa

SEQ ID NO: 82735 - DNA, 120 bp, Homo sapiens
  misc_feature: 317 for SV(C|O) and mtDNA
ctaacaccagcctaaccagatttcaaattttatcttttggcggtatgcacttttaacagtcaccccccaactaacacattattttcccctcccactcccatactactaatctcatcaata

SEQ ID NO: 82736 - DNA, 120 bp, Homo sapiens
  misc_feature: 317 for SV(C|O) and mtDNA
taacaccagcctaaccagatttcaaattttatcttttggcggtatgcacttttaacagtcaccccccaactaacacattattttcccctcccactcccatactactaatctcatcaatac

SEQ ID NO: 82737 - DNA, 120 bp, Homo sapiens
  misc_feature: 317 for SV(C|O) and mtDNA
atcaatacaacccccgcccatcctacccagcacacacaccgctgctaaccccataccccgaaccaaccaaaccccaaagacaccccccacagtttatgtagcttacctcctcaaagcaat

SEQ ID NO: 82738 - DNA, 120 bp, Homo sapiens
  misc_feature: 316 for SV(C|O) and mtDNA
ccatcctacccagcacacacaccgctgctaaccccataccccgaaccaaccaaaccccaaagacaccccccacagtttatgtagcttacctcctcaaagcaatacactgaaaatgtttag

SEQ ID NO: 82739 - DNA, 120 bp, Homo sapiens
  misc_feature: 316 for SV(C|O) and mtDNA
cctaacaccagcctaaccagatttcaaattttatcttttggcggtatgcacttttaacagtcaccccccaactaacacattattttcccctcccactcccatactactaatctcatcaat

SEQ ID NO: 82740 - DNA, 120 bp, Homo sapiens
  misc_feature: 316 for SV(C|O) and mtDNA
caccaaagcccataaaaataaaaaattataacaaaccctgagaaccaaaatgaacgaaaatctgttcgcttcattcattgcccccacaatcctaggcctacccgccgcagtactgatcat

SEQ ID NO: 82741 - DNA, 120 bp, Homo sapiens
  misc_feature: 315 for SV(C|O) and mtDNA
catcctacccagcacacacaccgctgctaaccccataccccgaaccaaccaaaccccaaagacaccccccacagtttatgtagcttacctcctcaaagcaatacactgaaaatgtttaga

SEQ ID NO: 82742 - DNA, 120 bp, Homo sapiens
  misc_feature: 314 for SV(C|O) and mtDNA
tcaatacaacccccgcccatcctacccagcacacacaccgctgctaaccccataccccgaaccaaccaaaccccaaagacaccccccacagtttatgtagcttacctcctcaaagcaata

SEQ ID NO: 82743 - DNA, 120 bp, Homo sapiens
  misc_feature: 314 for SV(C|O) and mtDNA
gctactacaacccttcgctgacgccataaaactcttcaccaaagagcccctaaaacccgccacatctaccatcaccctctacatcaccgccccgaccttagctctcaccatcgctcttct

SEQ ID NO: 82744 - DNA, 120 bp, Homo sapiens
  misc_feature: 312 for SV(C|O) and mtDNA
tcaccaaagcccataaaaataaaaaattataacaaaccctgagaaccaaaatgaacgaaaatctgttcgcttcattcattgcccccacaatcctaggcctacccgccgcagtactgatca

SEQ ID NO: 82745 - DNA, 120 bp, Homo sapiens
  misc_feature: 312 for SV(C|O) and mtDNA
cccatcctacccagcacacacaccgctgctaaccccataccccgaaccaaccaaaccccaaagacaccccccacagtttatgtagcttacctcctcaaagcaatacactgaaaatgttta

SEQ ID NO: 82746 - DNA, 120 bp, Homo sapiens
  misc_feature: 310 for SV(C|O) and mtDNA
cgcccatcctacccagcacacacaccgctgctaaccccataccccgaaccaaccaaaccccaaagacaccccccacagtttatgtagcttacctcctcaaagcaatacactgaaaatgtt

SEQ ID NO: 82747 - DNA, 120 bp, Homo sapiens
  misc_feature: 309 for SV(C|O) and mtDNA
ctactacaacccttcgctgacgccataaaactcttcaccaaagagcccctaaaacccgccacatctaccatcaccctctacatcaccgccccgaccttagctctcaccatcgctcttcta

SEQ ID NO: 82748 - DNA, 120 bp, Homo sapiens
  misc_feature: 309 for SV(C|O) and mtDNA
caccagcctaaccagatttcaaattttatcttttggcggtatgcacttttaacagtcaccccccaactaacacattattttcccctcccactcccatactactaatctcatcaatacaac

SEQ ID NO: 82749 - DNA, 120 bp, Homo sapiens
  misc_feature: 309 for SV(C|O) and mtDNA
cattattttcccctcccactcccatactactaatctcatcaatacaacccccgcccatcctacccagcacacacaccgctgctaaccccataccccgaaccaaccaaaccccaaagacac

SEQ ID NO: 82750 - DNA, 120 bp, Homo sapiens
  misc_feature: 308 for SV(C|O) and mtDNA
gcccatcctacccagcacacacaccgctgctaaccccataccccgaaccaaccaaaccccaaagacaccccccacagtttatgtagcttacctcctcaaagcaatacactgaaaatgttt

SEQ ID NO: 82751 - DNA, 120 bp, Homo sapiens
  misc_feature: 307 for SV(C|O) and mtDNA
tgacgccataaaactcttcaccaaagagcccctaaaacccgccacatctaccatcaccctctacatcaccgccccgaccttagctctcaccatcgctcttctactatgaacccccctccc

SEQ ID NO: 82752 - DNA, 120 bp, Homo sapiens
  misc_feature: 307 for SV(C|O) and mtDNA
cgcttctggccacagcacttaaacacatctctgccaaaccccaaaaacaaagaaccctaacaccagcctaaccagatttcaaattttatcttttggcggtatgcacttttaacagtcacc

SEQ ID NO: 82753 - DNA, 120 bp, Homo sapiens
  misc_feature: 306 for SV(C|O) and mtDNA
tactacaacccttcgctgacgccataaaactcttcaccaaagagcccctaaaacccgccacatctaccatcaccctctacatcaccgccccgaccttagctctcaccatcgctcttctac

SEQ ID NO: 82754 - DNA, 120 bp, Homo sapiens
  misc_feature: 305 for SV(C|O) and mtDNA
gacgccataaaactcttcaccaaagagcccctaaaacccgccacatctaccatcaccctctacatcaccgccccgaccttagctctcaccatcgctcttctactatgaacccccctcccc

SEQ ID NO: 82755 - DNA, 120 bp, Homo sapiens
  misc_feature: 302 for SV(C|O) and mtDNA
tacaacccttcgctgacgccataaaactcttcaccaaagagcccctaaaacccgccacatctaccatcaccctctacatcaccgccccgaccttagctctcaccatcgctcttctactat

SEQ ID NO: 82756 - DNA, 120 bp, Homo sapiens
  misc_feature: 302 for SV(C|O) and mtDNA
ccgcttctggccacagcacttaaacacatctctgccaaaccccaaaaacaaagaaccctaacaccagcctaaccagatttcaaattttatcttttggcggtatgcacttttaacagtcac

SEQ ID NO: 82757 - DNA, 120 bp, Homo sapiens
  misc_feature: 301 for SV(C|O) and mtDNA
tgactgttaaaagtgcataccgccaaaagataaaatttgaaatctggttaggctggtgttagggttctttgtttttggggtttggcagagatgtgtttaagtgctgtggccagaagcggg

SEQ ID NO: 82758 - DNA, 120 bp, Homo sapiens
  misc_feature: 301 for SV(C|O) and mtDNA
ctacaacccttcgctgacgccataaaactcttcaccaaagagcccctaaaacccgccacatctaccatcaccctctacatcaccgccccgaccttagctctcaccatcgctcttctacta

SEQ ID NO: 82759 - DNA, 120 bp, Homo sapiens
  misc_feature: 301 for SV(C|O) and mtDNA
actacaacccttcgctgacgccataaaactcttcaccaaagagcccctaaaacccgccacatctaccatcaccctctacatcaccgccccgaccttagctctcaccatcgctcttctact

SEQ ID NO: 82760 - DNA, 120 bp, Homo sapiens
  misc_feature: 300 for SV(C|O) and mtDNA
acattattttcccctcccactcccatactactaatctcatcaatacaacccccgcccatcctacccagcacacacaccgctgctaaccccataccccgaaccaaccaaaccccaaagaca

SEQ ID NO: 82761 - DNA, 120 bp, Homo sapiens
  misc_feature: 300 for SV(C|O) and mtDNA
acgccataaaactcttcaccaaagagcccctaaaacccgccacatctaccatcaccctctacatcaccgccccgaccttagctctcaccatcgctcttctactatgaacccccctcccca

SEQ ID NO: 82762 - DNA, 120 bp, Homo sapiens
  misc_feature: 298 for SV(C|O) and mtDNA
taacacattattttcccctcccactcccatactactaatctcatcaatacaacccccgcccatcctacccagcacacacaccgctgctaaccccataccccgaaccaaccaaaccccaaa

SEQ ID NO: 82763 - DNA, 120 bp, Homo sapiens
  misc_feature: 297 for SV(C|O) and mtDNA
cacattattttcccctcccactcccatactactaatctcatcaatacaacccccgcccatcctacccagcacacacaccgctgctaaccccataccccgaaccaaccaaaccccaaagac

SEQ ID NO: 82764 - DNA, 120 bp, Homo sapiens
  misc_feature: 295 for SV(C|O) and mtDNA
acaacccttcgctgacgccataaaactcttcaccaaagagcccctaaaacccgccacatctaccatcaccctctacatcaccgccccgaccttagctctcaccatcgctcttctactatg

SEQ ID NO: 82765 - DNA, 120 bp, Homo sapiens
  misc_feature: 293 for SV(C|O) and mtDNA
ctgacgccataaaactcttcaccaaagagcccctaaaacccgccacatctaccatcaccctctacatcaccgccccgaccttagctctcaccatcgctcttctactatgaacccccctcc

SEQ ID NO: 82766 - DNA, 120 bp, Homo sapiens
  misc_feature: 291 for SV(C|O) and mtDNA
ctaacacattattttcccctcccactcccatactactaatctcatcaatacaacccccgcccatcctacccagcacacacaccgctgctaaccccataccccgaaccaaccaaaccccaa

SEQ ID NO: 82767 - DNA, 120 bp, Homo sapiens
  misc_feature: 290 for SV(C|O) and mtDNA
acacattattttcccctcccactcccatactactaatctcatcaatacaacccccgcccatcctacccagcacacacaccgctgctaaccccataccccgaaccaaccaaaccccaaaga

SEQ ID NO: 82768 - DNA, 120 bp, Homo sapiens
  misc_feature: 290 for SV(C|O) and mtDNA
ccttcgctgacgccataaaactcttcaccaaagagcccctaaaacccgccacatctaccatcaccctctacatcaccgccccgaccttagctctcaccatcgctcttctactatgaaccc

SEQ ID NO: 82769 - DNA, 120 bp, Homo sapiens
  misc_feature: 290 for SV(C|O) and mtDNA
ataaaactcttcaccaaagagcccctaaaacccgccacatctaccatcaccctctacatcaccgccccgaccttagctctcaccatcgctcttctactatgaacccccctccccataccc

SEQ ID NO: 82770 - DNA, 120 bp, Homo sapiens
  misc_feature: 289 for SV(C|O) and mtDNA
gactgttaaaagtgcataccgccaaaagataaaatttgaaatctggttaggctggtgttagggttctttgtttttggggtttggcagagatgtgtttaagtgctgtggccagaagcgggg

SEQ ID NO: 82771 - DNA, 120 bp, Homo sapiens
  misc_feature: 287 for SV(C|O) and mtDNA
cgccataaaactcttcaccaaagagcccctaaaacccgccacatctaccatcaccctctacatcaccgccccgaccttagctctcaccatcgctcttctactatgaacccccctccccat

SEQ ID NO: 82772 - DNA, 120 bp, Homo sapiens
  misc_feature: 286 for SV(C|O) and mtDNA
aaaactcttcaccaaagagcccctaaaacccgccacatctaccatcaccctctacatcaccgccccgaccttagctctcaccatcgctcttctactatgaacccccctccccatacccaa

SEQ ID NO: 82773 - DNA, 120 bp, Homo sapiens
  misc_feature: 286 for SV(C|O) and mtDNA
taaaactcttcaccaaagagcccctaaaacccgccacatctaccatcaccctctacatcaccgccccgaccttagctctcaccatcgctcttctactatgaacccccctccccataccca

SEQ ID NO: 82774 - DNA, 120 bp, Homo sapiens
  misc_feature: 286 for SV(C|O) and mtDNA
caacccttcgctgacgccataaaactcttcaccaaagagcccctaaaacccgccacatctaccatcaccctctacatcaccgccccgaccttagctctcaccatcgctcttctactatga

SEQ ID NO: 82775 - DNA, 120 bp, Homo sapiens
  misc_feature: 286 for SV(C|O) and mtDNA
aaactcttcaccaaagagcccctaaaacccgccacatctaccatcaccctctacatcaccgccccgaccttagctctcaccatcgctcttctactatgaacccccctccccatacccaac

SEQ ID NO: 82776 - DNA, 120 bp, Homo sapiens
  misc_feature: 286 for SV(C|O) and mtDNA
aactcttcaccaaagagcccctaaaacccgccacatctaccatcaccctctacatcaccgccccgaccttagctctcaccatcgctcttctactatgaacccccctccccatacccaacc

SEQ ID NO: 82777 - DNA, 120 bp, Homo sapiens
  misc_feature: 286 for SV(C|O) and mtDNA
gctgacgccataaaactcttcaccaaagagcccctaaaacccgccacatctaccatcaccctctacatcaccgccccgaccttagctctcaccatcgctcttctactatgaacccccctc

SEQ ID NO: 82778 - DNA, 120 bp, Homo sapiens
  misc_feature: 285 for SV(C|O) and mtDNA
actcttcaccaaagagcccctaaaacccgccacatctaccatcaccctctacatcaccgccccgaccttagctctcaccatcgctcttctactatgaacccccctccccatacccaaccc

SEQ ID NO: 82779 - DNA, 120 bp, Homo sapiens
  misc_feature: 284 for SV(C|O) and mtDNA
tcttcaccaaagagcccctaaaacccgccacatctaccatcaccctctacatcaccgccccgaccttagctctcaccatcgctcttctactatgaacccccctccccatacccaaccccc

SEQ ID NO: 82780 - DNA, 120 bp, Homo sapiens
  misc_feature: 284 for SV(C|O) and mtDNA
cccttcgctgacgccataaaactcttcaccaaagagcccctaaaacccgccacatctaccatcaccctctacatcaccgccccgaccttagctctcaccatcgctcttctactatgaacc

SEQ ID NO: 82781 - DNA, 120 bp, Homo sapiens
  misc_feature: 284 for SV(C|O) and mtDNA
cttcgctgacgccataaaactcttcaccaaagagcccctaaaacccgccacatctaccatcaccctctacatcaccgccccgaccttagctctcaccatcgctcttctactatgaacccc

SEQ ID NO: 82782 - DNA, 120 bp, Homo sapiens
  misc_feature: 283 for SV(C|O) and mtDNA
ctcttcaccaaagagcccctaaaacccgccacatctaccatcaccctctacatcaccgccccgaccttagctctcaccatcgctcttctactatgaacccccctccccatacccaacccc

SEQ ID NO: 82783 - DNA, 120 bp, Homo sapiens
  misc_feature: 282 for SV(C|O) and mtDNA
cttcaccaaagagcccctaaaacccgccacatctaccatcaccctctacatcaccgccccgaccttagctctcaccatcgctcttctactatgaacccccctccccatacccaaccccct

SEQ ID NO: 82784 - DNA, 120 bp, Homo sapiens
  misc_feature: 281 for SV(C|O) and mtDNA
ttcgctgacgccataaaactcttcaccaaagagcccctaaaacccgccacatctaccatcaccctctacatcaccgccccgaccttagctctcaccatcgctcttctactatgaaccccc

SEQ ID NO: 82785 - DNA, 120 bp, Homo sapiens
  misc_feature: 281 for SV(C|O) and mtDNA
aacccttcgctgacgccataaaactcttcaccaaagagcccctaaaacccgccacatctaccatcaccctctacatcaccgccccgaccttagctctcaccatcgctcttctactatgaa

SEQ ID NO: 82786 - DNA, 120 bp, Homo sapiens
  misc_feature: 281 for SV(C|O) and mtDNA
actaacacattattttcccctcccactcccatactactaatctcatcaatacaacccccgcccatcctacccagcacacacaccgctgctaaccccataccccgaaccaaccaaacccca

SEQ ID NO: 82787 - DNA, 120 bp, Homo sapiens
  misc_feature: 280 for SV(C|O) and mtDNA
aacacattattttcccctcccactcccatactactaatctcatcaatacaacccccgcccatcctacccagcacacacaccgctgctaaccccataccccgaaccaaccaaaccccaaag

SEQ ID NO: 82788 - DNA, 120 bp, Homo sapiens
  misc_feature: 280 for SV(C|O) and mtDNA
ctgttaaaagtgcataccgccaaaagataaaatttgaaatctggttaggctggtgttagggttctttgtttttggggtttggcagagatgtgtttaagtgctgtggccagaagcgggggg

SEQ ID NO: 82789 - DNA, 120 bp, Homo sapiens
  misc_feature: 279 for SV(C|O) and mtDNA
gccataaaactcttcaccaaagagcccctaaaacccgccacatctaccatcaccctctacatcaccgccccgaccttagctctcaccatcgctcttctactatgaacccccctccccata

SEQ ID NO: 82790 - DNA, 120 bp, Homo sapiens
  misc_feature: 279 for SV(C|O) and mtDNA
cgctgacgccataaaactcttcaccaaagagcccctaaaacccgccacatctaccatcaccctctacatcaccgccccgaccttagctctcaccatcgctcttctactatgaacccccct

SEQ ID NO: 82791 - DNA, 120 bp, Homo sapiens
  misc_feature: 278 for SV(C|O) and mtDNA
ttcaccaaagagcccctaaaacccgccacatctaccatcaccctctacatcaccgccccgaccttagctctcaccatcgctcttctactatgaacccccctccccatacccaaccccctg

SEQ ID NO: 82792 - DNA, 120 bp, Homo sapiens
  misc_feature: 278 for SV(C|O) and mtDNA
tcgctgacgccataaaactcttcaccaaagagcccctaaaacccgccacatctaccatcaccctctacatcaccgccccgaccttagctctcaccatcgctcttctactatgaacccccc

SEQ ID NO: 82793 - DNA, 120 bp, Homo sapiens
  misc_feature: 278 for SV(C|O) and mtDNA
cataaaactcttcaccaaagagcccctaaaacccgccacatctaccatcaccctctacatcaccgccccgaccttagctctcaccatcgctcttctactatgaacccccctccccatacc

SEQ ID NO: 82794 - DNA, 120 bp, Homo sapiens
  misc_feature: 278 for SV(C|O) and mtDNA
actgttaaaagtgcataccgccaaaagataaaatttgaaatctggttaggctggtgttagggttctttgtttttggggtttggcagagatgtgtttaagtgctgtggccagaagcggggg

SEQ ID NO: 82795 - DNA, 120 bp, Homo sapiens
  misc_feature: 277 for SV(C|O) and mtDNA
acccttcgctgacgccataaaactcttcaccaaagagcccctaaaacccgccacatctaccatcaccctctacatcaccgccccgaccttagctctcaccatcgctcttctactatgaac

SEQ ID NO: 82796 - DNA, 120 bp, Homo sapiens
  misc_feature: 275 for SV(C|O) and mtDNA
ccataaaactcttcaccaaagagcccctaaaacccgccacatctaccatcaccctctacatcaccgccccgaccttagctctcaccatcgctcttctactatgaacccccctccccatac

SEQ ID NO: 82797 - DNA, 120 bp, Homo sapiens
  misc_feature: 274 for SV(C|O) and mtDNA
tcaccaaagagcccctaaaacccgccacatctaccatcaccctctacatcaccgccccgaccttagctctcaccatcgctcttctactatgaacccccctccccatacccaaccccctgg

SEQ ID NO: 82798 - DNA, 120 bp, Homo sapiens
  misc_feature: 272 for SV(C|O) and mtDNA
ttatcttttggcggtatgcacttttaacagtcaccccccaactaacacattattttcccctcccactcccatactactaatctcatcaatacaacccccgcccatcctacccagcacaca

SEQ ID NO: 82799 - DNA, 120 bp, Homo sapiens
  misc_feature: 270 for SV(C|O) and mtDNA
agagcccctaaaacccgccacatctaccatcaccctctacatcaccgccccgaccttagctctcaccatcgctcttctactatgaacccccctccccatacccaaccccctggtcaacct

SEQ ID NO: 82800 - DNA, 120 bp, Homo sapiens
  misc_feature: 268 for SV(C|O) and mtDNA
aagagcccctaaaacccgccacatctaccatcaccctctacatcaccgccccgaccttagctctcaccatcgctcttctactatgaacccccctccccatacccaaccccctggtcaacc

SEQ ID NO: 82801 - DNA, 120 bp, Homo sapiens
  misc_feature: 267 for SV(C|O) and mtDNA
aaattttatcttttggcggtatgcacttttaacagtcaccccccaactaacacattattttcccctcccactcccatactactaatctcatcaatacaacccccgcccatcctacccagc

SEQ ID NO: 82802 - DNA, 120 bp, Homo sapiens
  misc_feature: 266 for SV(C|O) and mtDNA
tttatcttttggcggtatgcacttttaacagtcaccccccaactaacacattattttcccctcccactcccatactactaatctcatcaatacaacccccgcccatcctacccagcacac

SEQ ID NO: 82803 - DNA, 120 bp, Homo sapiens
  misc_feature: 266 for SV(C|O) and mtDNA
ttcaaattttatcttttggcggtatgcacttttaacagtcaccccccaactaacacattattttcccctcccactcccatactactaatctcatcaatacaacccccgcccatcctaccc

SEQ ID NO: 82804 - DNA, 120 bp, Homo sapiens
  misc_feature: 266 for SV(C|O) and mtDNA
aattttatcttttggcggtatgcacttttaacagtcaccccccaactaacacattattttcccctcccactcccatactactaatctcatcaatacaacccccgcccatcctacccagca

SEQ ID NO: 82805 - DNA, 120 bp, Homo sapiens
  misc_feature: 266 for SV(C|O) and mtDNA
ggctggtgttagggttctttgtttttggggtttggcagagatgtgtttaagtgctgtggccagaagcggggggagggggggtttggtggaaattttttgttatgatgtctgtgtggaaag

SEQ ID NO: 82806 - DNA, 120 bp, Homo sapiens
  misc_feature: 266 for SV(C|O) and mtDNA
accaaagagcccctaaaacccgccacatctaccatcaccctctacatcaccgccccgaccttagctctcaccatcgctcttctactatgaacccccctccccatacccaaccccctggtc

SEQ ID NO: 82807 - DNA, 120 bp, Homo sapiens
  misc_feature: 265 for SV(C|O) and mtDNA
ttttatcttttggcggtatgcacttttaacagtcaccccccaactaacacattattttcccctcccactcccatactactaatctcatcaatacaacccccgcccatcctacccagcaca

SEQ ID NO: 82808 - DNA, 120 bp, Homo sapiens
  misc_feature: 265 for SV(C|O) and mtDNA
aggctggtgttagggttctttgtttttggggtttggcagagatgtgtttaagtgctgtggccagaagcggggggagggggggtttggtggaaattttttgttatgatgtctgtgtggaaa

SEQ ID NO: 82809 - DNA, 120 bp, Homo sapiens
  misc_feature: 265 for SV(C|O) and mtDNA
aaagagcccctaaaacccgccacatctaccatcaccctctacatcaccgccccgaccttagctctcaccatcgctcttctactatgaacccccctccccatacccaaccccctggtcaac

SEQ ID NO: 82810 - DNA, 120 bp, Homo sapiens
  misc_feature: 264 for SV(C|O) and mtDNA
caaattttatcttttggcggtatgcacttttaacagtcaccccccaactaacacattattttcccctcccactcccatactactaatctcatcaatacaacccccgcccatcctacccag

SEQ ID NO: 82811 - DNA, 120 bp, Homo sapiens
  misc_feature: 263 for SV(C|O) and mtDNA
taggctggtgttagggttctttgtttttggggtttggcagagatgtgtttaagtgctgtggccagaagcggggggagggggggtttggtggaaattttttgttatgatgtctgtgtggaa

SEQ ID NO: 82812 - DNA, 120 bp, Homo sapiens
  misc_feature: 262 for SV(C|O) and mtDNA
tgcacttttaacagtcaccccccaactaacacattattttcccctcccactcccatactactaatctcatcaatacaacccccgcccatcctacccagcacacacaccgctgctaacccc

SEQ ID NO: 82813 - DNA, 120 bp, Homo sapiens
  misc_feature: 262 for SV(C|O) and mtDNA
caccaaagagcccctaaaacccgccacatctaccatcaccctctacatcaccgccccgaccttagctctcaccatcgctcttctactatgaacccccctccccatacccaaccccctggt

SEQ ID NO: 82814 - DNA, 120 bp, Homo sapiens
  misc_feature: 261 for SV(C|O) and mtDNA
caaagagcccctaaaacccgccacatctaccatcaccctctacatcaccgccccgaccttagctctcaccatcgctcttctactatgaacccccctccccatacccaaccccctggtcaa

SEQ ID NO: 82815 - DNA, 120 bp, Homo sapiens; identical to SEQ ID NO: 63135
  misc_feature: 261 for SV(C|O) and mtDNA

SEQ ID NO: 82816 - DNA, 120 bp, Homo sapiens
  misc_feature: 259 for SV(C|O) and mtDNA
tcaaattttatcttttggcggtatgcacttttaacagtcaccccccaactaacacattattttcccctcccactcccatactactaatctcatcaatacaacccccgcccatcctaccca

SEQ ID NO: 82817 - DNA, 120 bp, Homo sapiens
  misc_feature: 259 for SV(C|O) and mtDNA
gcacttttaacagtcaccccccaactaacacattattttcccctcccactcccatactactaatctcatcaatacaacccccgcccatcctacccagcacacacaccgctgctaacccca

SEQ ID NO: 82818 - DNA, 120 bp, Homo sapiens
  misc_feature: 259 for SV(C|O) and mtDNA
ccaaagagcccctaaaacccgccacatctaccatcaccctctacatcaccgccccgaccttagctctcaccatcgctcttctactatgaacccccctccccatacccaaccccctggtca

SEQ ID NO: 82819 - DNA, 120 bp, Homo sapiens
  misc_feature: 257 for SV(C|O) and mtDNA
gctggtgttagggttctttgtttttggggtttggcagagatgtgtttaagtgctgtggccagaagcggggggagggggggtttggtggaaattttttgttatgatgtctgtgtggaaagc

SEQ ID NO: 82820 - DNA, 120 bp, Homo sapiens
  misc_feature: 257 for SV(C|O) and mtDNA
cacttttaacagtcaccccccaactaacacattattttcccctcccactcccatactactaatctcatcaatacaacccccgcccatcctacccagcacacacaccgctgctaaccccat

SEQ ID NO: 82821 - DNA, 120 bp, Homo sapiens
  misc_feature: 255 for SV(C|O) and mtDNA
acttttaacagtcaccccccaactaacacattattttcccctcccactcccatactactaatctcatcaatacaacccccgcccatcctacccagcacacacaccgctgctaaccccata

SEQ ID NO: 82822 - DNA, 120 bp, Homo sapiens
  misc_feature: 255 for SV(C|O) and mtDNA
atgcacttttaacagtcaccccccaactaacacattattttcccctcccactcccatactactaatctcatcaatacaacccccgcccatcctacccagcacacacaccgctgctaaccc

SEQ ID NO: 82823 - DNA, 120 bp, Homo sapiens
  misc_feature: 254 for SV(C|O) and mtDNA
tatgcacttttaacagtcaccccccaactaacacattattttcccctcccactcccatactactaatctcatcaatacaacccccgcccatcctacccagcacacacaccgctgctaacc

SEQ ID NO: 82824 - DNA, 120 bp, Homo sapiens
  misc_feature: 253 for SV(C|O) and mtDNA
tgttaaaagtgcataccgccaaaagataaaatttgaaatctggttaggctggtgttagggttctttgtttttggggtttggcagagatgtgtttaagtgctgtggccagaagcgggggga

SEQ ID NO: 82825 - DNA, 120 bp, Homo sapiens
  misc_feature: 251 for SV(C|O) and mtDNA
gttaaaagtgcataccgccaaaagataaaatttgaaatctggttaggctggtgttagggttctttgtttttggggtttggcagagatgtgtttaagtgctgtggccagaagcggggggag

SEQ ID NO: 82826 - DNA, 120 bp, Homo sapiens
  misc_feature: 250 for SV(C|O) and mtDNA
ttaaaagtgcataccgccaaaagataaaatttgaaatctggttaggctggtgttagggttctttgtttttggggtttggcagagatgtgtttaagtgctgtggccagaagcggggggagg

SEQ ID NO: 82827 - DNA, 120 bp, Homo sapiens
  misc_feature: 250 for SV(C|O) and mtDNA
atgatttatcctacactccaactcatgagacccacaacaaatagcccttctaaacgctaatccaagcctcactccactactaggcctcctcctagcagcagcaggcaaatcagcccaatt

SEQ ID NO: 82828 - DNA, 120 bp, Homo sapiens
  misc_feature: 249 for SV(C|O) and mtDNA
catgatttatcctacactccaactcatgagacccacaacaaatagcccttctaaacgctaatccaagcctcactccactactaggcctcctcctagcagcagcaggcaaatcagcccaat

SEQ ID NO: 82829 - DNA, 120 bp, Homo sapiens
  misc_feature: 248 for SV(C|O) and mtDNA
gcatgatttatcctacactccaactcatgagacccacaacaaatagcccttctaaacgctaatccaagcctcactccactactaggcctcctcctagcagcagcaggcaaatcagcccaa

SEQ ID NO: 82830 - DNA, 120 bp, Homo sapiens
  misc_feature: 247 for SV(C|O) and mtDNA
taaaagtgcataccgccaaaagataaaatttgaaatctggttaggctggtgttagggttctttgtttttggggtttggcagagatgtgtttaagtgctgtggccagaagcggggggaggg

SEQ ID NO: 82831 - DNA, 120 bp, Homo sapiens
  misc_feature: 246 for SV(C|O) and mtDNA
agcatgatttatcctacactccaactcatgagacccacaacaaatagcccttctaaacgctaatccaagcctcactccactactaggcctcctcctagcagcagcaggcaaatcagccca

SEQ ID NO: 82832 - DNA, 120 bp, Homo sapiens
  misc_feature: 246 for SV(C|O) and mtDNA
ctggtgttagggttctttgtttttggggtttggcagagatgtgtttaagtgctgtggccagaagcggggggagggggggtttggtggaaattttttgttatgatgtctgtgtggaaagcg

SEQ ID NO: 82833 - DNA, 120 bp, Homo sapiens
  misc_feature: 243 for SV(C|O) and mtDNA
tggtgttagggttctttgtttttggggtttggcagagatgtgtttaagtgctgtggccagaagcggggggagggggggtttggtggaaattttttgttatgatgtctgtgtggaaagcgg

SEQ ID NO: 82834 - DNA, 120 bp, Homo sapiens
  misc_feature: 243 for SV(C|O) and mtDNA
gtatgcacttttaacagtcaccccccaactaacacattattttcccctcccactcccatactactaatctcatcaatacaacccccgcccatcctacccagcacacacaccgctgctaac

SEQ ID NO: 82835 - DNA, 120 bp, Homo sapiens
  misc_feature: 243 for SV(C|O) and mtDNA
gcctcactccactactaggcctcctcctagcagcagcaggcaaatcagcccaattaggtctccacccctgactcccctcagccatagaaggccccaccccagtctcagccctactccact

SEQ ID NO: 82836 - DNA, 120 bp, Homo sapiens
  misc_feature: 242 for SV(C|O) and mtDNA
aagcctcactccactactaggcctcctcctagcagcagcaggcaaatcagcccaattaggtctccacccctgactcccctcagccatagaaggccccaccccagtctcagccctactcca

SEQ ID NO: 82837 - DNA, 120 bp, Homo sapiens
  misc_feature: 242 for SV(C|O) and mtDNA
tgatttatcctacactccaactcatgagacccacaacaaatagcccttctaaacgctaatccaagcctcactccactactaggcctcctcctagcagcagcaggcaaatcagcccaatta

SEQ ID NO: 82838 - DNA, 120 bp, Homo sapiens
  misc_feature: 241 for SV(C|O) and mtDNA
cctcgccttagcatgatttatcctacactccaactcatgagacccacaacaaatagcccttctaaacgctaatccaagcctcactccactactaggcctcctcctagcagcagcaggcaa

SEQ ID NO: 82839 - DNA, 120 bp, Homo sapiens
  misc_feature: 241 for SV(C|O) and mtDNA
ggtatgcacttttaacagtcaccccccaactaacacattattttcccctcccactcccatactactaatctcatcaatacaacccccgcccatcctacccagcacacacaccgctgctaa

SEQ ID NO: 82840 - DNA, 120 bp, Homo sapiens
  misc_feature: 241 for SV(C|O) and mtDNA
cggtatgcacttttaacagtcaccccccaactaacacattattttcccctcccactcccatactactaatctcatcaatacaacccccgcccatcctacccagcacacacaccgctgcta

SEQ ID NO: 82841 - DNA, 120 bp, Homo sapiens
  misc_feature: 241 for SV(C|O) and mtDNA
agcctcactccactactaggcctcctcctagcagcagcaggcaaatcagcccaattaggtctccacccctgactcccctcagccatagaaggccccaccccagtctcagccctactccac

SEQ ID NO: 82842 - DNA, 120 bp, Homo sapiens
  misc_feature: 241 for SV(C|O) and mtDNA
cctcactccactactaggcctcctcctagcagcagcaggcaaatcagcccaattaggtctccacccctgactcccctcagccatagaaggccccaccccagtctcagccctactccactc

SEQ ID NO: 82843 - DNA, 120 bp, Homo sapiens
  misc_feature: 240 for SV(C|O) and mtDNA
ctcgccttagcatgatttatcctacactccaactcatgagacccacaacaaatagcccttctaaacgctaatccaagcctcactccactactaggcctcctcctagcagcagcaggcaaa

SEQ ID NO: 82844 - DNA, 120 bp, Homo sapiens
  misc_feature: 240 for SV(C|O) and mtDNA
tgctaggaggaggcctagtagtggagtgaggcttggattagcgtttagaagggctatttgttgtgggtctcatgagttggagtgtaggataaatcatgctaaggcgaggatgaaaccgat

SEQ ID NO: 82845 - DNA, 120 bp, Homo sapiens
  misc_feature: 240 for SV(C|O) and mtDNA
ggggagtcaggggtggagacctaattgggctgatttgcctgctgctgctaggaggaggcctagtagtggagtgaggcttggattagcgtttagaagggctatttgttgtgggtctcatga

SEQ ID NO: 82846 - DNA, 120 bp, Homo sapiens
  misc_feature: 240 for SV(C|O) and mtDNA
ctaggaggaggcctagtagtggagtgaggcttggattagcgtttagaagggctatttgttgtgggtctcatgagttggagtgtaggataaatcatgctaaggcgaggatgaaaccgatat

SEQ ID NO: 82847 - DNA, 120 bp, Homo sapiens
  misc_feature: 239 for SV(C|O) and mtDNA
tttgaaatctggttaggctggtgttagggttctttgtttttggggtttggcagagatgtgtttaagtgctgtggccagaagcggggggagggggggtttggtggaaattttttgttatga

SEQ ID NO: 82848 - DNA, 120 bp, Homo sapiens
  misc_feature: 239 for SV(C|O) and mtDNA
ttgaaatctggttaggctggtgttagggttctttgtttttggggtttggcagagatgtgtttaagtgctgtggccagaagcggggggagggggggtttggtggaaattttttgttatgat

SEQ ID NO: 82849 - DNA, 120 bp, Homo sapiens
  misc_feature: 239 for SV(C|O) and mtDNA
gccttagcatgatttatcctacactccaactcatgagacccacaacaaatagcccttctaaacgctaatccaagcctcactccactactaggcctcctcctagcagcagcaggcaaatca

SEQ ID NO: 82850 - DNA, 120 bp, Homo sapiens
  misc_feature: 239 for SV(C|O) and mtDNA
gctaggaggaggcctagtagtggagtgaggcttggattagcgtttagaagggctatttgttgtgggtctcatgagttggagtgtaggataaatcatgctaaggcgaggatgaaaccgata

SEQ ID NO: 82851 - DNA, 120 bp, Homo sapiens
  misc_feature: 239 for SV(C|O) and mtDNA
ggtgttagggttctttgtttttggggtttggcagagatgtgtttaagtgctgtggccagaagcggggggagggggggtttggtggaaattttttgttatgatgtctgtgtggaaagcggc

SEQ ID NO: 82852 - DNA, 120 bp, Homo sapiens
  misc_feature: 239 for SV(C|O) and mtDNA
aggggtggagacctaattgggctgatttgcctgctgctgctaggaggaggcctagtagtggagtgaggcttggattagcgtttagaagggctatttgttgtgggtctcatgagttggagt

SEQ ID NO: 82853 - DNA, 120 bp, Homo sapiens
  misc_feature: 238 for SV(C|O) and mtDNA
tcaggggtggagacctaattgggctgatttgcctgctgctgctaggaggaggcctagtagtggagtgaggcttggattagcgtttagaagggctatttgttgtgggtctcatgagttgga

SEQ ID NO: 82854 - DNA, 120 bp, Homo sapiens
  misc_feature: 238 for SV(C|O) and mtDNA
tagcatgatttatcctacactccaactcatgagacccacaacaaatagcccttctaaacgctaatccaagcctcactccactactaggcctcctcctagcagcagcaggcaaatcagccc

SEQ ID NO: 82855 - DNA, 120 bp, Homo sapiens
  misc_feature: 238 for SV(C|O) and mtDNA
ggcggtatgcacttttaacagtcaccccccaactaacacattattttcccctcccactcccatactactaatctcatcaatacaacccccgcccatcctacccagcacacacaccgctgc

SEQ ID NO: 82856 - DNA, 120 bp, Homo sapiens
  misc_feature: 238 for SV(C|O) and mtDNA
ggagtcaggggtggagacctaattgggctgatttgcctgctgctgctaggaggaggcctagtagtggagtgaggcttggattagcgtttagaagggctatttgttgtgggtctcatgagt

SEQ ID NO: 82857 - DNA, 120 bp, Homo sapiens
  misc_feature: 238 for SV(C|O) and mtDNA
gatttatcctacactccaactcatgagacccacaacaaatagcccttctaaacgctaatccaagcctcactccactactaggcctcctcctagcagcagcaggcaaatcagcccaattag

SEQ ID NO: 82858 - DNA, 120 bp, Homo sapiens
  misc_feature: 238 for SV(C|O) and mtDNA
caggggtggagacctaattgggctgatttgcctgctgctgctaggaggaggcctagtagtggagtgaggcttggattagcgtttagaagggctatttgttgtgggtctcatgagttggag

SEQ ID NO: 82859 - DNA, 120 bp, Homo sapiens
  misc_feature: 237 for SV(C|O) and mtDNA
ttagcatgatttatcctacactccaactcatgagacccacaacaaatagcccttctaaacgctaatccaagcctcactccactactaggcctcctcctagcagcagcaggcaaatcagcc

SEQ ID NO: 82860 - DNA, 120 bp, Homo sapiens
  misc_feature: 237 for SV(C|O) and mtDNA
ctccactactaggcctcctcctagcagcagcaggcaaatcagcccaattaggtctccacccctgactcccctcagccatagaaggccccaccccagtctcagccctactccactcaagca

SEQ ID NO: 82861 - DNA, 120 bp, Homo sapiens
  misc_feature: 237 for SV(C|O) and mtDNA
tcctcgccttagcatgatttatcctacactccaactcatgagacccacaacaaatagcccttctaaacgctaatccaagcctcactccactactaggcctcctcctagcagcagcaggca

SEQ ID NO: 82862 - DNA, 120 bp, Homo sapiens
  misc_feature: 237 for SV(C|O) and mtDNA
ctcactccactactaggcctcctcctagcagcagcaggcaaatcagcccaattaggtctccacccctgactcccctcagccatagaaggccccaccccagtctcagccctactccactca

SEQ ID NO: 82863 - DNA, 120 bp, Homo sapiens
  misc_feature: 237 for SV(C|O) and mtDNA
gcggtatgcacttttaacagtcaccccccaactaacacattattttcccctcccactcccatactactaatctcatcaatacaacccccgcccatcctacccagcacacacaccgctgct

SEQ ID NO: 82864 - DNA, 120 bp, Homo sapiens
  misc_feature: 237 for SV(C|O) and mtDNA
gaggggagtcaggggtggagacctaattgggctgatttgcctgctgctgctaggaggaggcctagtagtggagtgaggcttggattagcgtttagaagggctatttgttgtgggtctcat

SEQ ID NO: 82865 - DNA, 120 bp, Homo sapiens
  misc_feature: 237 for SV(C|O) and mtDNA
atcctacactccaactcatgagacccacaacaaatagcccttctaaacgctaatccaagcctcactccactactaggcctcctcctagcagcagcaggcaaatcagcccaattaggtctc

SEQ ID NO: 82866 - DNA, 120 bp, Homo sapiens
  misc_feature: 237 for SV(C|O) and mtDNA
aggggagtcaggggtggagacctaattgggctgatttgcctgctgctgctaggaggaggcctagtagtggagtgaggcttggattagcgtttagaagggctatttgttgtgggtctcatg

SEQ ID NO: 82867 - DNA, 120 bp, Homo sapiens
  misc_feature: 236 for SV(C|O) and mtDNA
tcactccactactaggcctcctcctagcagcagcaggcaaatcagcccaattaggtctccacccctgactcccctcagccatagaaggccccaccccagtctcagccctactccactcaa

SEQ ID NO: 82868 - DNA, 120 bp, Homo sapiens
  misc_feature: 236 for SV(C|O) and mtDNA
tgttagggttctttgtttttggggtttggcagagatgtgtttaagtgctgtggccagaagcggggggagggggggtttggtggaaattttttgttatgatgtctgtgtggaaagcggctg

SEQ ID NO: 82869 - DNA, 120 bp, Homo sapiens
  misc_feature: 236 for SV(C|O) and mtDNA
taaaatttgaaatctggttaggctggtgttagggttctttgtttttggggtttggcagagatgtgtttaagtgctgtggccagaagcggggggagggggggtttggtggaaattttttgt

SEQ ID NO: 82870 - DNA, 120 bp, Homo sapiens
  misc_feature: 236 for SV(C|O) and mtDNA
actccactactaggcctcctcctagcagcagcaggcaaatcagcccaattaggtctccacccctgactcccctcagccatagaaggccccaccccagtctcagccctactccactcaagc

SEQ ID NO: 82871 - DNA, 120 bp, Homo sapiens
  misc_feature: 236 for SV(C|O) and mtDNA
gctgctaggaggaggcctagtagtggagtgaggcttggattagcgtttagaagggctatttgttgtgggtctcatgagttggagtgtaggataaatcatgctaaggcgaggatgaaaccg

SEQ ID NO: 82872 - DNA, 120 bp, Homo sapiens
  misc_feature: 236 for SV(C|O) and mtDNA
agtgaggcttggattagcgtttagaagggctatttgttgtgggtctcatgagttggagtgtaggataaatcatgctaaggcgaggatgaaaccgatatcgccgatacggttgtataggat

SEQ ID NO: 82873 - DNA, 120 bp, Homo sapiens
  misc_feature: 235 for SV(C|O) and mtDNA
tgaggggagtcaggggtggagacctaattgggctgatttgcctgctgctgctaggaggaggcctagtagtggagtgaggcttggattagcgtttagaagggctatttgttgtgggtctca

SEQ ID NO: 82874 - DNA, 120 bp, Homo sapiens
  misc_feature: 235 for SV(C|O) and mtDNA
tgaaatctggttaggctggtgttagggttctttgtttttggggtttggcagagatgtgtttaagtgctgtggccagaagcggggggagggggggtttggtggaaattttttgttatgatg

SEQ ID NO: 82875 - DNA, 120 bp, Homo sapiens
  misc_feature: 235 for SV(C|O) and mtDNA
tcgccttagcatgatttatcctacactccaactcatgagacccacaacaaatagcccttctaaacgctaatccaagcctcactccactactaggcctcctcctagcagcagcaggcaaat

SEQ ID NO: 82876 - DNA, 120 bp, Homo sapiens
  misc_feature: 235 for SV(C|O) and mtDNA
aaatttgaaatctggttaggctggtgttagggttctttgtttttggggtttggcagagatgtgtttaagtgctgtggccagaagcggggggagggggggtttggtggaaattttttgtta

SEQ ID NO: 82877 - DNA, 120 bp, Homo sapiens
  misc_feature: 235 for SV(C|O) and mtDNA
gttagggttctttgtttttggggtttggcagagatgtgtttaagtgctgtggccagaagcggggggagggggggtttggtggaaattttttgttatgatgtctgtgtggaaagcggctgt

SEQ ID NO: 82878 - DNA, 120 bp, Homo sapiens
  misc_feature: 235 for SV(C|O) and mtDNA
cgccttagcatgatttatcctacactccaactcatgagacccacaacaaatagcccttctaaacgctaatccaagcctcactccactactaggcctcctcctagcagcagcaggcaaatc

SEQ ID NO: 82879 - DNA, 120 bp, Homo sapiens
  misc_feature: 235 for SV(C|O) and mtDNA
cactccactactaggcctcctcctagcagcagcaggcaaatcagcccaattaggtctccacccctgactcccctcagccatagaaggccccaccccagtctcagccctactccactcaag

SEQ ID NO: 82880 - DNA, 120 bp, Homo sapiens
  misc_feature: 235 for SV(C|O) and mtDNA
atttatcctacactccaactcatgagacccacaacaaatagcccttctaaacgctaatccaagcctcactccactactaggcctcctcctagcagcagcaggcaaatcagcccaattagg

SEQ ID NO: 82881 - DNA, 120 bp, Homo sapiens
  misc_feature: 235 for SV(C|O) and mtDNA
atttgaaatctggttaggctggtgttagggttctttgtttttggggtttggcagagatgtgtttaagtgctgtggccagaagcggggggagggggggtttggtggaaattttttgttatg

SEQ ID NO: 82882 - DNA, 120 bp, Homo sapiens
  misc_feature: 234 for SV(C|O) and mtDNA
tcctacactccaactcatgagacccacaacaaatagcccttctaaacgctaatccaagcctcactccactactaggcctcctcctagcagcagcaggcaaatcagcccaattaggtctcc

SEQ ID NO: 82883 - DNA, 120 bp, Homo sapiens
  misc_feature: 234 for SV(C|O) and mtDNA
tcatcctcgccttagcatgatttatcctacactccaactcatgagacccacaacaaatagcccttctaaacgctaatccaagcctcactccactactaggcctcctcctagcagcagcag

SEQ ID NO: 82884 - DNA, 120 bp, Homo sapiens
  misc_feature: 234 for SV(C|O) and mtDNA
taggaggaggcctagtagtggagtgaggcttggattagcgtttagaagggctatttgttgtgggtctcatgagttggagtgtaggataaatcatgctaaggcgaggatgaaaccgatatc

SEQ ID NO: 82885 - DNA, 120 bp, Homo sapiens
  misc_feature: 234 for SV(C|O) and mtDNA
caagcctcactccactactaggcctcctcctagcagcagcaggcaaatcagcccaattaggtctccacccctgactcccctcagccatagaaggccccaccccagtctcagccctactcc

SEQ ID NO: 82886 - DNA, 120 bp, Homo sapiens
  misc_feature: 234 for SV(C|O) and mtDNA
cttagcatgatttatcctacactccaactcatgagacccacaacaaatagcccttctaaacgctaatccaagcctcactccactactaggcctcctcctagcagcagcaggcaaatcagc

SEQ ID NO: 82887 - DNA, 120 bp, Homo sapiens
  misc_feature: 234 for SV(C|O) and mtDNA
atcctcgccttagcatgatttatcctacactccaactcatgagacccacaacaaatagcccttctaaacgctaatccaagcctcactccactactaggcctcctcctagcagcagcaggc

SEQ ID NO: 82888 - DNA, 120 bp, Homo sapiens
  misc_feature: 234 for SV(C|O) and mtDNA
gagtcaggggtggagacctaattgggctgatttgcctgctgctgctaggaggaggcctagtagtggagtgaggcttggattagcgtttagaagggctatttgttgtgggtctcatgagtt

SEQ ID NO: 82889 - DNA, 120 bp, Homo sapiens
  misc_feature: 234 for SV(C|O) and mtDNA
cctagtagtggagtgaggcttggattagcgtttagaagggctatttgttgtgggtctcatgagttggagtgtaggataaatcatgctaaggcgaggatgaaaccgatatcgccgatacgg

SEQ ID NO: 82890 - DNA, 120 bp, Homo sapiens
  misc_feature: 234 for SV(C|O) and mtDNA
aatttgaaatctggttaggctggtgttagggttctttgtttttggggtttggcagagatgtgtttaagtgctgtggccagaagcggggggagggggggtttggtggaaattttttgttat

SEQ ID NO: 82891 - DNA, 120 bp, Homo sapiens
  misc_feature: 234 for SV(C|O) and mtDNA
aaaatttgaaatctggttaggctggtgttagggttctttgtttttggggtttggcagagatgtgtttaagtgctgtggccagaagcggggggagggggggtttggtggaaattttttgtt

SEQ ID NO: 82892 - DNA, 120 bp, Homo sapiens
  misc_feature: 233 for SV(C|O) and mtDNA
tagtagtggagtgaggcttggattagcgtttagaagggctatttgttgtgggtctcatgagttggagtgtaggataaatcatgctaaggcgaggatgaaaccgatatcgccgatacggtt

SEQ ID NO: 82893 - DNA, 120 bp, Homo sapiens
  misc_feature: 233 for SV(C|O) and mtDNA
gtgttagggttctttgtttttggggtttggcagagatgtgtttaagtgctgtggccagaagcggggggagggggggtttggtggaaattttttgttatgatgtctgtgtggaaagcggct

SEQ ID NO: 82894 - DNA, 120 bp, Homo sapiens
  misc_feature: 233 for SV(C|O) and mtDNA
gtggagacctaattgggctgatttgcctgctgctgctaggaggaggcctagtagtggagtgaggcttggattagcgtttagaagggctatttgttgtgggtctcatgagttggagtgtag

SEQ ID NO: 82895 - DNA, 120 bp, Homo sapiens
  misc_feature: 233 for SV(C|O) and mtDNA
gggagtcaggggtggagacctaattgggctgatttgcctgctgctgctaggaggaggcctagtagtggagtgaggcttggattagcgtttagaagggctatttgttgtgggtctcatgag

SEQ ID NO: 82896 - DNA, 120 bp, Homo sapiens
  misc_feature: 232 for SV(C|O) and mtDNA
tttatcctacactccaactcatgagacccacaacaaatagcccttctaaacgctaatccaagcctcactccactactaggcctcctcctagcagcagcaggcaaatcagcccaattaggt

SEQ ID NO: 82897 - DNA, 120 bp, Homo sapiens
  misc_feature: 232 for SV(C|O) and mtDNA
ttagggttctttgtttttggggtttggcagagatgtgtttaagtgctgtggccagaagcggggggagggggggtttggtggaaattttttgttatgatgtctgtgtggaaagcggctgtg

SEQ ID NO: 82898 - DNA, 120 bp, Homo sapiens
  misc_feature: 232 for SV(C|O) and mtDNA
cctacactccaactcatgagacccacaacaaatagcccttctaaacgctaatccaagcctcactccactactaggcctcctcctagcagcagcaggcaaatcagcccaattaggtctcca

SEQ ID NO: 82899 - DNA, 120 bp, Homo sapiens
  misc_feature: 232 for SV(C|O) and mtDNA
ctgctaggaggaggcctagtagtggagtgaggcttggattagcgtttagaagggctatttgttgtgggtctcatgagttggagtgtaggataaatcatgctaaggcgaggatgaaaccga

SEQ ID NO: 82900 - DNA, 120 bp, Homo sapiens
  misc_feature: 232 for SV(C|O) and mtDNA
gtggagtgaggcttggattagcgtttagaagggctatttgttgtgggtctcatgagttggagtgtaggataaatcatgctaaggcgaggatgaaaccgatatcgccgatacggttgtata

SEQ ID NO: 82901 - DNA, 120 bp, Homo sapiens
  misc_feature: 232 for SV(C|O) and mtDNA
tagggttctttgtttttggggtttggcagagatgtgtttaagtgctgtggccagaagcggggggagggggggtttggtggaaattttttgttatgatgtctgtgtggaaagcggctgtgc

SEQ ID NO: 82902 - DNA, 120 bp, Homo sapiens
  misc_feature: 232 for SV(C|O) and mtDNA
ggtggagacctaattgggctgatttgcctgctgctgctaggaggaggcctagtagtggagtgaggcttggattagcgtttagaagggctatttgttgtgggtctcatgagttggagtgta

SEQ ID NO: 82903 - DNA, 120 bp, Homo sapiens
  misc_feature: 232 for SV(C|O) and mtDNA
catcctcgccttagcatgatttatcctacactccaactcatgagacccacaacaaatagcccttctaaacgctaatccaagcctcactccactactaggcctcctcctagcagcagcagg

SEQ ID NO: 82904 - DNA, 120 bp, Homo sapiens
  misc_feature: 232 for SV(C|O) and mtDNA
agtcaggggtggagacctaattgggctgatttgcctgctgctgctaggaggaggcctagtagtggagtgaggcttggattagcgtttagaagggctatttgttgtgggtctcatgagttg

SEQ ID NO: 82905 - DNA, 120 bp, Homo sapiens
  misc_feature: 231 for SV(C|O) and mtDNA
ttcatcctcgccttagcatgatttatcctacactccaactcatgagacccacaacaaatagcccttctaaacgctaatccaagcctcactccactactaggcctcctcctagcagcagca

SEQ ID NO: 82906 - DNA, 120 bp, Homo sapiens
  misc_feature: 231 for SV(C|O) and mtDNA
ttatcctacactccaactcatgagacccacaacaaatagcccttctaaacgctaatccaagcctcactccactactaggcctcctcctagcagcagcaggcaaatcagcccaattaggtc

SEQ ID NO: 82907 - DNA, 120 bp, Homo sapiens
  misc_feature: 231 for SV(C|O) and mtDNA
tgctgctaggaggaggcctagtagtggagtgaggcttggattagcgtttagaagggctatttgttgtgggtctcatgagttggagtgtaggataaatcatgctaaggcgaggatgaaacc

SEQ ID NO: 82908 - DNA, 120 bp, Homo sapiens
  misc_feature: 231 for SV(C|O) and mtDNA
agggttctttgtttttggggtttggcagagatgtgtttaagtgctgtggccagaagcggggggagggggggtttggtggaaattttttgttatgatgtctgtgtggaaagcggctgtgca

SEQ ID NO: 82909 - DNA, 120 bp, Homo sapiens
  misc_feature: 231 for SV(C|O) and mtDNA
tccactactaggcctcctcctagcagcagcaggcaaatcagcccaattaggtctccacccctgactcccctcagccatagaaggccccaccccagtctcagccctactccactcaagcac

SEQ ID NO: 82910 - DNA, 120 bp, Homo sapiens
  misc_feature: 231 for SV(C|O) and mtDNA
gtcaggggtggagacctaattgggctgatttgcctgctgctgctaggaggaggcctagtagtggagtgaggcttggattagcgtttagaagggctatttgttgtgggtctcatgagttgg

SEQ ID NO: 82911 - DNA, 120 bp, Homo sapiens
  misc_feature: 231 for SV(C|O) and mtDNA
ctagtagtggagtgaggcttggattagcgtttagaagggctatttgttgtgggtctcatgagttggagtgtaggataaatcatgctaaggcgaggatgaaaccgatatcgccgatacggt

SEQ ID NO: 82912 - DNA, 120 bp, Homo sapiens
  misc_feature: 230 for SV(C|O) and mtDNA
ttctaaacgctaatccaagcctcactccactactaggcctcctcctagcagcagcaggcaaatcagcccaattaggtctccacccctgactcccctcagccatagaaggccccaccccag

SEQ ID NO: 82913 - DNA, 120 bp, Homo sapiens
  misc_feature: 230 for SV(C|O) and mtDNA
gagtgaggcttggattagcgtttagaagggctatttgttgtgggtctcatgagttggagtgtaggataaatcatgctaaggcgaggatgaaaccgatatcgccgatacggttgtatagga

SEQ ID NO: 82914 - DNA, 120 bp, Homo sapiens
  misc_feature: 230 for SV(C|O) and mtDNA
ggcctagtagtggagtgaggcttggattagcgtttagaagggctatttgttgtgggtctcatgagttggagtgtaggataaatcatgctaaggcgaggatgaaaccgatatcgccgatac

SEQ ID NO: 82915 - DNA, 120 bp, Homo sapiens
  misc_feature: 230 for SV(C|O) and mtDNA
ggggtggagacctaattgggctgatttgcctgctgctgctaggaggaggcctagtagtggagtgaggcttggattagcgtttagaagggctatttgttgtgggtctcatgagttggagtg

SEQ ID NO: 82916 - DNA, 120 bp, Homo sapiens
  misc_feature: 230 for SV(C|O) and mtDNA
ggagtgaggcttggattagcgtttagaagggctatttgttgtgggtctcatgagttggagtgtaggataaatcatgctaaggcgaggatgaaaccgatatcgccgatacggttgtatagg

SEQ ID NO: 82917 - DNA, 120 bp, Homo sapiens
  misc_feature: 230 for SV(C|O) and mtDNA
agtggagtgaggcttggattagcgtttagaagggctatttgttgtgggtctcatgagttggagtgtaggataaatcatgctaaggcgaggatgaaaccgatatcgccgatacggttgtat

SEQ ID NO: 82918 - DNA, 120 bp, Homo sapiens
  misc_feature: 229 for SV(C|O) and mtDNA
tatcctacactccaactcatgagacccacaacaaatagcccttctaaacgctaatccaagcctcactccactactaggcctcctcctagcagcagcaggcaaatcagcccaattaggtct

SEQ ID NO: 82919 - DNA, 120 bp, Homo sapiens
  misc_feature: 229 for SV(C|O) and mtDNA
tagtggagtgaggcttggattagcgtttagaagggctatttgttgtgggtctcatgagttggagtgtaggataaatcatgctaaggcgaggatgaaaccgatatcgccgatacggttgta

SEQ ID NO: 82920 - DNA, 120 bp, Homo sapiens
  misc_feature: 229 for SV(C|O) and mtDNA
gggttctttgtttttggggtttggcagagatgtgtttaagtgctgtggccagaagcggggggagggggggtttggtggaaattttttgttatgatgtctgtgtggaaagcggctgtgcag

SEQ ID NO: 82921 - DNA, 120 bp, Homo sapiens
  misc_feature: 229 for SV(C|O) and mtDNA
gcctagtagtggagtgaggcttggattagcgtttagaagggctatttgttgtgggtctcatgagttggagtgtaggataaatcatgctaaggcgaggatgaaaccgatatcgccgatacg

SEQ ID NO: 82922 - DNA, 120 bp, Homo sapiens
  misc_feature: 229 for SV(C|O) and mtDNA
ccttagcatgatttatcctacactccaactcatgagacccacaacaaatagcccttctaaacgctaatccaagcctcactccactactaggcctcctcctagcagcagcaggcaaatcag

SEQ ID NO: 82923 - DNA, 120 bp, Homo sapiens
  misc_feature: 229 for SV(C|O) and mtDNA
agtagtggagtgaggcttggattagcgtttagaagggctatttgttgtgggtctcatgagttggagtgtaggataaatcatgctaaggcgaggatgaaaccgatatcgccgatacggttg

SEQ ID NO: 82924 - DNA, 120 bp, Homo sapiens
  misc_feature: 228 for SV(C|O) and mtDNA
aggcctagtagtggagtgaggcttggattagcgtttagaagggctatttgttgtgggtctcatgagttggagtgtaggataaatcatgctaaggcgaggatgaaaccgatatcgccgata

SEQ ID NO: 82925 - DNA, 120 bp, Homo sapiens
  misc_feature: 228 for SV(C|O) and mtDNA
gctgaggggagtcaggggtggagacctaattgggctgatttgcctgctgctgctaggaggaggcctagtagtggagtgaggcttggattagcgtttagaagggctatttgttgtgggtct

SEQ ID NO: 82926 - DNA, 120 bp, Homo sapiens
  misc_feature: 228 for SV(C|O) and mtDNA
aggaggaggcctagtagtggagtgaggcttggattagcgtttagaagggctatttgttgtgggtctcatgagttggagtgtaggataaatcatgctaaggcgaggatgaaaccgatatcg

SEQ ID NO: 82927 - DNA, 120 bp, Homo sapiens
  misc_feature: 227 for SV(C|O) and mtDNA
tggagtgaggcttggattagcgtttagaagggctatttgttgtgggtctcatgagttggagtgtaggataaatcatgctaaggcgaggatgaaaccgatatcgccgatacggttgtatag

SEQ ID NO: 82928 - DNA, 120 bp, Homo sapiens
  misc_feature: 227 for SV(C|O) and mtDNA
tatggctgaggggagtcaggggtggagacctaattgggctgatttgcctgctgctgctaggaggaggcctagtagtggagtgaggcttggattagcgtttagaagggctatttgttgtgg

SEQ ID NO: 82929 - DNA, 120 bp, Homo sapiens
  misc_feature: 226 for SV(C|O) and mtDNA
gtagtggagtgaggcttggattagcgtttagaagggctatttgttgtgggtctcatgagttggagtgtaggataaatcatgctaaggcgaggatgaaaccgatatcgccgatacggttgt

SEQ ID NO: 82930 - DNA, 120 bp, Homo sapiens
  misc_feature: 226 for SV(C|O) and mtDNA
atccaagcctcactccactactaggcctcctcctagcagcagcaggcaaatcagcccaattaggtctccacccctgactcccctcagccatagaaggccccaccccagtctcagccctac

SEQ ID NO: 82931 - DNA, 120 bp, Homo sapiens
  misc_feature: 226 for SV(C|O) and mtDNA
gggtggagacctaattgggctgatttgcctgctgctgctaggaggaggcctagtagtggagtgaggcttggattagcgtttagaagggctatttgttgtgggtctcatgagttggagtgt

SEQ ID NO: 82932 - DNA, 120 bp, Homo sapiens
  misc_feature: 226 for SV(C|O) and mtDNA
aatagcccttctaaacgctaatccaagcctcactccactactaggcctcctcctagcagcagcaggcaaatcagcccaattaggtctccacccctgactcccctcagccatagaaggccc

SEQ ID NO: 82933 - DNA, 120 bp, Homo sapiens
  misc_feature: 226 for SV(C|O) and mtDNA
aaatagcccttctaaacgctaatccaagcctcactccactactaggcctcctcctagcagcagcaggcaaatcagcccaattaggtctccacccctgactcccctcagccatagaaggcc

SEQ ID NO: 82934 - DNA, 120 bp, Homo sapiens
  misc_feature: 226 for SV(C|O) and mtDNA
ctgaggggagtcaggggtggagacctaattgggctgatttgcctgctgctgctaggaggaggcctagtagtggagtgaggcttggattagcgtttagaagggctatttgttgtgggtctc

SEQ ID NO: 82935 - DNA, 120 bp, Homo sapiens
  misc_feature: 225 for SV(C|O) and mtDNA
aatccaagcctcactccactactaggcctcctcctagcagcagcaggcaaatcagcccaattaggtctccacccctgactcccctcagccatagaaggccccaccccagtctcagcccta

SEQ ID NO: 82936 - DNA, 120 bp, Homo sapiens
  misc_feature: 225 for SV(C|O) and mtDNA
atagcccttctaaacgctaatccaagcctcactccactactaggcctcctcctagcagcagcaggcaaatcagcccaattaggtctccacccctgactcccctcagccatagaaggcccc

SEQ ID NO: 82937 - DNA, 120 bp, Homo sapiens
  misc_feature: 225 for SV(C|O) and mtDNA
ggaggaggcctagtagtggagtgaggcttggattagcgtttagaagggctatttgttgtgggtctcatgagttggagtgtaggataaatcatgctaaggcgaggatgaaaccgatatcgc

SEQ ID NO: 82938 - DNA, 120 bp, Homo sapiens
  misc_feature: 225 for SV(C|O) and mtDNA
ccaagcctcactccactactaggcctcctcctagcagcagcaggcaaatcagcccaattaggtctccacccctgactcccctcagccatagaaggccccaccccagtctcagccctactc

SEQ ID NO: 82939 - DNA, 120 bp, Homo sapiens
  misc_feature: 225 for SV(C|O) and mtDNA
cacaacaaatagcccttctaaacgctaatccaagcctcactccactactaggcctcctcctagcagcagcaggcaaatcagcccaattaggtctccacccctgactcccctcagccatag

SEQ ID NO: 82940 - DNA, 120 bp, Homo sapiens
  misc_feature: 225 for SV(C|O) and mtDNA
atggctgaggggagtcaggggtggagacctaattgggctgatttgcctgctgctgctaggaggaggcctagtagtggagtgaggcttggattagcgtttagaagggctatttgttgtggg

SEQ ID NO: 82941 - DNA, 120 bp, Homo sapiens
  misc_feature: 224 for SV(C|O) and mtDNA
cttctaaacgctaatccaagcctcactccactactaggcctcctcctagcagcagcaggcaaatcagcccaattaggtctccacccctgactcccctcagccatagaaggccccacccca

SEQ ID NO: 82942 - DNA, 120 bp, Homo sapiens
  misc_feature: 224 for SV(C|O) and mtDNA
tagcccttctaaacgctaatccaagcctcactccactactaggcctcctcctagcagcagcaggcaaatcagcccaattaggtctccacccctgactcccctcagccatagaaggcccca

SEQ ID NO: 82943 - DNA, 120 bp, Homo sapiens
  misc_feature: 224 for SV(C|O) and mtDNA
ctgctgctaggaggaggcctagtagtggagtgaggcttggattagcgtttagaagggctatttgttgtgggtctcatgagttggagtgtaggataaatcatgctaaggcgaggatgaaac

SEQ ID NO: 82944 - DNA, 120 bp, Homo sapiens
  misc_feature: 224 for SV(C|O) and mtDNA
caaatagcccttctaaacgctaatccaagcctcactccactactaggcctcctcctagcagcagcaggcaaatcagcccaattaggtctccacccctgactcccctcagccatagaaggc

SEQ ID NO: 82945 - DNA, 120 bp, Homo sapiens
  misc_feature: 223 for SV(C|O) and mtDNA
tctaaacgctaatccaagcctcactccactactaggcctcctcctagcagcagcaggcaaatcagcccaattaggtctccacccctgactcccctcagccatagaaggccccaccccagt

SEQ ID NO: 82946 - DNA, 120 bp, Homo sapiens
  misc_feature: 223 for SV(C|O) and mtDNA
tccaagcctcactccactactaggcctcctcctagcagcagcaggcaaatcagcccaattaggtctccacccctgactcccctcagccatagaaggccccaccccagtctcagccctact

SEQ ID NO: 82947 - DNA, 120 bp, Homo sapiens
  misc_feature: 223 for SV(C|O) and mtDNA
taatccaagcctcactccactactaggcctcctcctagcagcagcaggcaaatcagcccaattaggtctccacccctgactcccctcagccatagaaggccccaccccagtctcagccct

SEQ ID NO: 82948 - DNA, 120 bp, Homo sapiens
  misc_feature: 223 for SV(C|O) and mtDNA
ctaatccaagcctcactccactactaggcctcctcctagcagcagcaggcaaatcagcccaattaggtctccacccctgactcccctcagccatagaaggccccaccccagtctcagccc

SEQ ID NO: 82949 - DNA, 120 bp, Homo sapiens
  misc_feature: 223 for SV(C|O) and mtDNA
ggctgaggggagtcaggggtggagacctaattgggctgatttgcctgctgctgctaggaggaggcctagtagtggagtgaggcttggattagcgtttagaagggctatttgttgtgggtc

SEQ ID NO: 82950 - DNA, 120 bp, Homo sapiens
  misc_feature: 223 for SV(C|O) and mtDNA
aacaaatagcccttctaaacgctaatccaagcctcactccactactaggcctcctcctagcagcagcaggcaaatcagcccaattaggtctccacccctgactcccctcagccatagaag

SEQ ID NO: 82951 - DNA, 120 bp, Homo sapiens
  misc_feature: 222 for SV(C|O) and mtDNA
gctaatccaagcctcactccactactaggcctcctcctagcagcagcaggcaaatcagcccaattaggtctccacccctgactcccctcagccatagaaggccccaccccagtctcagcc

SEQ ID NO: 82952 - DNA, 120 bp, Homo sapiens
  misc_feature: 222 for SV(C|O) and mtDNA
gaggaggcctagtagtggagtgaggcttggattagcgtttagaagggctatttgttgtgggtctcatgagttggagtgtaggataaatcatgctaaggcgaggatgaaaccgatatcgcc

SEQ ID NO: 82953 - DNA, 120 bp, Homo sapiens
  misc_feature: 221 for SV(C|O) and mtDNA
tttcatcctcgccttagcatgatttatcctacactccaactcatgagacccacaacaaatagcccttctaaacgctaatccaagcctcactccactactaggcctcctcctagcagcagc

SEQ ID NO: 82954 - DNA, 120 bp, Homo sapiens
  misc_feature: 221 for SV(C|O) and mtDNA
tggctgaggggagtcaggggtggagacctaattgggctgatttgcctgctgctgctaggaggaggcctagtagtggagtgaggcttggattagcgtttagaagggctatttgttgtgggt

SEQ ID NO: 82955 - DNA, 120 bp, Homo sapiens
  misc_feature: 221 for SV(C|O) and mtDNA
agcccttctaaacgctaatccaagcctcactccactactaggcctcctcctagcagcagcaggcaaatcagcccaattaggtctccacccctgactcccctcagccatagaaggccccac

SEQ ID NO: 82956 - DNA, 120 bp, Homo sapiens
  misc_feature: 220 for SV(C|O) and mtDNA
taaacgctaatccaagcctcactccactactaggcctcctcctagcagcagcaggcaaatcagcccaattaggtctccacccctgactcccctcagccatagaaggccccaccccagtct

SEQ ID NO: 82957 - DNA, 120 bp, Homo sapiens
  misc_feature: 220 for SV(C|O) and mtDNA
cgctaatccaagcctcactccactactaggcctcctcctagcagcagcaggcaaatcagcccaattaggtctccacccctgactcccctcagccatagaaggccccaccccagtctcagc

SEQ ID NO: 82958 - DNA, 120 bp, Homo sapiens
  misc_feature: 220 for SV(C|O) and mtDNA
aaacgctaatccaagcctcactccactactaggcctcctcctagcagcagcaggcaaatcagcccaattaggtctccacccctgactcccctcagccatagaaggccccaccccagtctc

SEQ ID NO: 82959 - DNA, 120 bp, Homo sapiens
  misc_feature: 220 for SV(C|O) and mtDNA
aggaggcctagtagtggagtgaggcttggattagcgtttagaagggctatttgttgtgggtctcatgagttggagtgtaggataaatcatgctaaggcgaggatgaaaccgatatcgccg

SEQ ID NO: 82960 - DNA, 120 bp, Homo sapiens
  misc_feature: 220 for SV(C|O) and mtDNA
acaaatagcccttctaaacgctaatccaagcctcactccactactaggcctcctcctagcagcagcaggcaaatcagcccaattaggtctccacccctgactcccctcagccatagaagg

SEQ ID NO: 82961 - DNA, 120 bp, Homo sapiens
  misc_feature: 219 for SV(C|O) and mtDNA
aacgctaatccaagcctcactccactactaggcctcctcctagcagcagcaggcaaatcagcccaattaggtctccacccctgactcccctcagccatagaaggccccaccccagtctca

SEQ ID NO: 82962 - DNA, 120 bp, Homo sapiens
  misc_feature: 218 for SV(C|O) and mtDNA
ctaaacgctaatccaagcctcactccactactaggcctcctcctagcagcagcaggcaaatcagcccaattaggtctccacccctgactcccctcagccatagaaggccccaccccagtc

SEQ ID NO: 82963 - DNA, 120 bp, Homo sapiens
  misc_feature: 217 for SV(C|O) and mtDNA
acaacaaatagcccttctaaacgctaatccaagcctcactccactactaggcctcctcctagcagcagcaggcaaatcagcccaattaggtctccacccctgactcccctcagccataga

SEQ ID NO: 82964 - DNA, 120 bp, Homo sapiens
  misc_feature: 217 for SV(C|O) and mtDNA
cccttctaaacgctaatccaagcctcactccactactaggcctcctcctagcagcagcaggcaaatcagcccaattaggtctccacccctgactcccctcagccatagaaggccccaccc

SEQ ID NO: 82965 - DNA, 120 bp, Homo sapiens
  misc_feature: 217 for SV(C|O) and mtDNA
ccttctaaacgctaatccaagcctcactccactactaggcctcctcctagcagcagcaggcaaatcagcccaattaggtctccacccctgactcccctcagccatagaaggccccacccc

SEQ ID NO: 82966 - DNA, 120 bp, Homo sapiens
  misc_feature: 217 for SV(C|O) and mtDNA
gaggcctagtagtggagtgaggcttggattagcgtttagaagggctatttgttgtgggtctcatgagttggagtgtaggataaatcatgctaaggcgaggatgaaaccgatatcgccgat

SEQ ID NO: 82967 - DNA, 120 bp, Homo sapiens
  misc_feature: 216 for SV(C|O) and mtDNA
gcccttctaaacgctaatccaagcctcactccactactaggcctcctcctagcagcagcaggcaaatcagcccaattaggtctccacccctgactcccctcagccatagaaggccccacc

SEQ ID NO: 82968 - DNA, 120 bp, Homo sapiens
  misc_feature: 215 for SV(C|O) and mtDNA
caacaaatagcccttctaaacgctaatccaagcctcactccactactaggcctcctcctagcagcagcaggcaaatcagcccaattaggtctccacccctgactcccctcagccatagaa

SEQ ID NO: 82969 - DNA, 120 bp, Homo sapiens
  misc_feature: 214 for SV(C|O) and mtDNA
acgctaatccaagcctcactccactactaggcctcctcctagcagcagcaggcaaatcagcccaattaggtctccacccctgactcccctcagccatagaaggccccaccccagtctcag

SEQ ID NO: 82970 - DNA, 120 bp, Homo sapiens
  misc_feature: 212 for SV(C|O) and mtDNA
ggaggcctagtagtggagtgaggcttggattagcgtttagaagggctatttgttgtgggtctcatgagttggagtgtaggataaatcatgctaaggcgaggatgaaaccgatatcgccga

SEQ ID NO: 82971 - DNA, 120 bp, Homo sapiens; identical to SEQ ID NO: 50385
  misc_feature: 693 for SV(W|G) and 28S

SEQ ID NO: 82972 - DNA, 120 bp, Homo sapiens; identical to SEQ ID NO: 50418
  misc_feature: 690 for SV(W|G) and 28S

SEQ ID NO: 82973 - DNA, 120 bp, Homo sapiens; identical to SEQ ID NO: 50445
  misc_feature: 688 for SV(W|G) and 28S

SEQ ID NO: 82974 - DNA, 120 bp, Homo sapiens; identical to SEQ ID NO: 50468
  misc_feature: 686 for SV(W|G) and 28S

SEQ ID NO: 82975 - DNA, 120 bp, Homo sapiens; identical to SEQ ID NO: 50496
  misc_feature: 683 for SV(W|G) and 28S

SEQ ID NO: 82976 - DNA, 120 bp, Homo sapiens; identical to SEQ ID NO: 50501
  misc_feature: 683 for SV(W|G) and 28S

SEQ ID NO: 82977 - DNA, 120 bp, Homo sapiens; identical to SEQ ID NO: 50518
  misc_feature: 681 for SV(W|G) and 28S

SEQ ID NO: 82978 - DNA, 120 bp, Homo sapiens; identical to SEQ ID NO: 50530
  misc_feature: 681 for SV(W|G) and 28S

SEQ ID NO: 82979 - DNA, 120 bp, Homo sapiens; identical to SEQ ID NO: 50549
  misc_feature: 680 for SV(W|G) and 28S

SEQ ID NO: 82980 - DNA, 120 bp, Homo sapiens; identical to SEQ ID NO: 50559
  misc_feature: 679 for SV(W|G) and 28S

SEQ ID NO: 82981 - DNA, 120 bp, Homo sapiens; identical to SEQ ID NO: 50569
  misc_feature: 678 for SV(W|G) and 28S

SEQ ID NO: 82982 - DNA, 120 bp, Homo sapiens; identical to SEQ ID NO: 50573
  misc_feature: 677 for SV(W|G) and 28S

SEQ ID NO: 82983 - DNA, 120 bp, Homo sapiens; identical to SEQ ID NO: 50581
  misc_feature: 677 for SV(W|G) and 28S

SEQ ID NO: 82984 - DNA, 120 bp, Homo sapiens; identical to SEQ ID NO: 50611
  misc_feature: 674 for SV(W|G) and 28S

SEQ ID NO: 82985 - DNA, 120 bp, Homo sapiens; identical to SEQ ID NO: 50652
  misc_feature: 670 for SV(W|G) and 28S

SEQ ID NO: 82986 - DNA, 120 bp, Homo sapiens; identical to SEQ ID NO: 51297
  misc_feature: 570 for SV(W|G) and 28S

SEQ ID NO: 82987 - DNA, 120 bp, Homo sapiens; identical to SEQ ID NO: 51300
  misc_feature: 569 for SV(W|G) and 28S

SEQ ID NO: 82988 - DNA, 120 bp, Homo sapiens; identical to SEQ ID NO: 51301
  misc_feature: 569 for SV(W|G) and 28S

SEQ ID NO: 82989 - DNA, 120 bp, Homo sapiens; identical to SEQ ID NO: 51309
  misc_feature: 567 for SV(W|G) and 28S

SEQ ID NO: 82990 - DNA, 120 bp, Homo sapiens; identical to SEQ ID NO: 51324
  misc_feature: 563 for SV(W|G) and 28S

SEQ ID NO: 82991 - DNA, 120 bp, Homo sapiens; identical to SEQ ID NO: 51331
  misc_feature: 559 for SV(W|G) and 28S

SEQ ID NO: 82992 - DNA, 120 bp, Homo sapiens; identical to SEQ ID NO: 51335
  misc_feature: 558 for SV(W|G) and 28S

SEQ ID NO: 82993 - DNA, 120 bp, Homo sapiens; identical to SEQ ID NO: 51336
  misc_feature: 558 for SV(W|G) and 28S

SEQ ID NO: 82994 - DNA, 120 bp, Homo sapiens; identical to SEQ ID NO: 51381
  misc_feature: 545 for SV(W|G) and 28S

SEQ ID NO: 82995 - DNA, 120 bp, Homo sapiens; identical to SEQ ID NO: 51389
  misc_feature: 543 for SV(W|G) and 28S

SEQ ID NO: 82996 - DNA, 120 bp, Homo sapiens; identical to SEQ ID NO: 51397
  misc_feature: 541 for SV(W|G) and 28S

SEQ ID NO: 82997 - DNA, 120 bp, Homo sapiens; identical to SEQ ID NO: 51398
  misc_feature: 541 for SV(W|G) and 28S

SEQ ID NO: 82998 - DNA, 120 bp, Homo sapiens; identical to SEQ ID NO: 51404
  misc_feature: 539 for SV(W|G) and 28S

SEQ ID NO: 82999 - DNA, 120 bp, Homo sapiens; identical to SEQ ID NO: 51405
  misc_feature: 539 for SV(W|G) and 28S

SEQ ID NO: 83000 - DNA, 120 bp, Homo sapiens; identical to SEQ ID NO: 51416
  misc_feature: 534 for SV(W|G) and 28S

SEQ ID NO: 83001 - DNA, 120 bp, Homo sapiens; identical to SEQ ID NO: 51417
  misc_feature: 533 for SV(W|G) and 28S

SEQ ID NO: 83002 - DNA, 120 bp, Homo sapiens; identical to SEQ ID NO: 51422
  misc_feature: 532 for SV(W|G) and 28S

SEQ ID NO: 83003 - DNA, 120 bp, Homo sapiens; identical to SEQ ID NO: 51436
  misc_feature: 529 for SV(W|G) and 28S

SEQ ID NO: 83004 - DNA, 120 bp, Homo sapiens; identical to SEQ ID NO: 51439
  misc_feature: 529 for SV(W|G) and 28S

SEQ ID NO: 83005 - DNA, 120 bp, Homo sapiens; identical to SEQ ID NO: 51440
  misc_feature: 528 for SV(W|G) and 28S

SEQ ID NO: 83006 - DNA, 120 bp, Homo sapiens; identical to SEQ ID NO: 51442
  misc_feature: 527 for SV(W|G) and 28S

SEQ ID NO: 83007 - DNA, 120 bp, Homo sapiens; identical to SEQ ID NO: 51448
  misc_feature: 525 for SV(W|G) and 28S

SEQ ID NO: 83008 - DNA, 120 bp, Homo sapiens; identical to SEQ ID NO: 51452
  misc_feature: 524 for SV(W|G) and 28S

SEQ ID NO: 83009 - DNA, 120 bp, Homo sapiens; identical to SEQ ID NO: 51456
  misc_feature: 523 for SV(W|G) and 28S

SEQ ID NO: 83010 - DNA, 120 bp, Homo sapiens; identical to SEQ ID NO: 51461
  misc_feature: 521 for SV(W|G) and 28S

SEQ ID NO: 83011 - DNA, 120 bp, Homo sapiens; identical to SEQ ID NO: 51465
  misc_feature: 520 for SV(W|G) and 28S

SEQ ID NO: 83012 - DNA, 120 bp, Homo sapiens; identical to SEQ ID NO: 51468
  misc_feature: 519 for SV(W|G) and 28S

SEQ ID NO: 83013 - DNA, 120 bp, Homo sapiens; identical to SEQ ID NO: 51471
  misc_feature: 519 for SV(W|G) and 28S

SEQ ID NO: 83014 - DNA, 120 bp, Homo sapiens; identical to SEQ ID NO: 51477
  misc_feature: 518 for SV(W|G) and 28S

SEQ ID NO: 83015 - DNA, 120 bp, Homo sapiens; identical to SEQ ID NO: 51480
  misc_feature: 517 for SV(W|G) and 28S

SEQ ID NO: 83016 - DNA, 120 bp, Homo sapiens; identical to SEQ ID NO: 51484
  misc_feature: 516 for SV(W|G) and 28S

SEQ ID NO: 83017 - DNA, 120 bp, Homo sapiens; identical to SEQ ID NO: 51488
  misc_feature: 515 for SV(W|G) and 28S

SEQ ID NO: 83018 - DNA, 120 bp, Homo sapiens; identical to SEQ ID NO: 51492
  misc_feature: 514 for SV(W|G) and 28S

SEQ ID NO: 83019 - DNA, 120 bp, Homo sapiens; identical to SEQ ID NO: 51493
  misc_feature: 514 for SV(W|G) and 28S

SEQ ID NO: 83020 - DNA, 120 bp, Homo sapiens; identical to SEQ ID NO: 51497
  misc_feature: 513 for SV(W|G) and 28S

SEQ ID NO: 83021 - DNA, 120 bp, Homo sapiens; identical to SEQ ID NO: 51501
  misc_feature: 512 for SV(W|G) and 28S

SEQ ID NO: 83022 - DNA, 120 bp, Homo sapiens; identical to SEQ ID NO: 51512
  misc_feature: 511 for SV(W|G) and 28S

SEQ ID NO: 83023 - DNA, 120 bp, Homo sapiens; identical to SEQ ID NO: 51513
  misc_feature: 511 for SV(W|G) and 28S

SEQ ID NO: 83024 - DNA, 120 bp, Homo sapiens; identical to SEQ ID NO: 51517
  misc_feature: 510 for SV(W|G) and 28S

SEQ ID NO: 83025 - DNA, 120 bp, Homo sapiens; identical to SEQ ID NO: 51520
  misc_feature: 510 for SV(W|G) and 28S

SEQ ID NO: 83026 - DNA, 120 bp, Homo sapiens; identical to SEQ ID NO: 51526
  misc_feature: 509 for SV(W|G) and 28S

SEQ ID NO: 83027 - DNA, 120 bp, Homo sapiens; identical to SEQ ID NO: 51532
  misc_feature: 509 for SV(W|G) and 28S

SEQ ID NO: 83028 - DNA, 120 bp, Homo sapiens; identical to SEQ ID NO: 51540
  misc_feature: 506 for SV(W|G) and 28S

SEQ ID NO: 83029 - DNA, 120 bp, Homo sapiens; identical to SEQ ID NO: 51542
  misc_feature: 505 for SV(W|G) and 28S

SEQ ID NO: 83030 - DNA, 120 bp, Homo sapiens; identical to SEQ ID NO: 51543
  misc_feature: 505 for SV(W|G) and 28S

SEQ ID NO: 83031 - DNA, 120 bp, Homo sapiens; identical to SEQ ID NO: 51545
  misc_feature: 505 for SV(W|G) and 28S

SEQ ID NO: 83032 - DNA, 120 bp, Homo sapiens; identical to SEQ ID NO: 51547
  misc_feature: 505 for SV(W|G) and 28S

SEQ ID NO: 83033 - DNA, 120 bp, Homo sapiens; identical to SEQ ID NO: 51552
  misc_feature: 503 for SV(W|G) and 28S

SEQ ID NO: 83034 - DNA, 120 bp, Homo sapiens; identical to SEQ ID NO: 51569
  misc_feature: 499 for SV(W|G) and 28S

SEQ ID NO: 83035 - DNA, 120 bp, Homo sapiens; identical to SEQ ID NO: 51574
  misc_feature: 498 for SV(W|G) and 28S

SEQ ID NO: 83036 - DNA, 120 bp, Homo sapiens; identical to SEQ ID NO: 51590
  misc_feature: 496 for SV(W|G) and 28S

SEQ ID NO: 83037 - DNA, 120 bp, Homo sapiens; identical to SEQ ID NO: 51597
  misc_feature: 495 for SV(W|G) and 28S

SEQ ID NO: 83038 - DNA, 120 bp, Homo sapiens; identical to SEQ ID NO: 51604
  misc_feature: 494 for SV(W|G) and 28S

SEQ ID NO: 83039 - DNA, 120 bp, Homo sapiens; identical to SEQ ID NO: 51612
  misc_feature: 492 for SV(W|G) and 28S

SEQ ID NO: 83040 - DNA, 120 bp, Homo sapiens; identical to SEQ ID NO: 51614
  misc_feature: 492 for SV(W|G) and 28S

SEQ ID NO: 83041 - DNA, 120 bp, Homo sapiens; identical to SEQ ID NO: 51624
  misc_feature: 490 for SV(W|G) and 28S

SEQ ID NO: 83042 - DNA, 120 bp, Homo sapiens; identical to SEQ ID NO: 51626
  misc_feature: 490 for SV(W|G) and 28S

SEQ ID NO: 83043 - DNA, 120 bp, Homo sapiens; identical to SEQ ID NO: 51629
  misc_feature: 488 for SV(W|G) and 28S

SEQ ID NO: 83044 - DNA, 120 bp, Homo sapiens; identical to SEQ ID NO: 51631
  misc_feature: 488 for SV(W|G) and 28S

SEQ ID NO: 83045 - DNA, 120 bp, Homo sapiens; identical to SEQ ID NO: 51633
  misc_feature: 487 for SV(W|G) and 28S

SEQ ID NO: 83046 - DNA, 120 bp, Homo sapiens; identical to SEQ ID NO: 51635
  misc_feature: 487 for SV(W|G) and 28S

SEQ ID NO: 83047 - DNA, 120 bp, Homo sapiens; identical to SEQ ID NO: 51637
  misc_feature: 487 for SV(W|G) and 28S

SEQ ID NO: 83048 - DNA, 120 bp, Homo sapiens; identical to SEQ ID NO: 51643
  misc_feature: 486 for SV(W|G) and 28S

SEQ ID NO: 83049 - DNA, 120 bp, Homo sapiens; identical to SEQ ID NO: 51644
  misc_feature: 486 for SV(W|G) and 28S

SEQ ID NO: 83050 - DNA, 120 bp, Homo sapiens; identical to SEQ ID NO: 51647
  misc_feature: 485 for SV(W|G) and 28S

SEQ ID NO: 83051 - DNA, 120 bp, Homo sapiens; identical to SEQ ID NO: 51649
  misc_feature: 485 for SV(W|G) and 28S

SEQ ID NO: 83052 - DNA, 120 bp, Homo sapiens; identical to SEQ ID NO: 51654
  misc_feature: 484 for SV(W|G) and 28S

SEQ ID NO: 83053 - DNA, 120 bp, Homo sapiens; identical to SEQ ID NO: 51656
  misc_feature: 483 for SV(W|G) and 28S

SEQ ID NO: 83054 - DNA, 120 bp, Homo sapiens; identical to SEQ ID NO: 51657
  misc_feature: 483 for SV(W|G) and 28S

SEQ ID NO: 83055 - DNA, 120 bp, Homo sapiens; identical to SEQ ID NO: 51659
  misc_feature: 483 for SV(W|G) and 28S

SEQ ID NO: 83056 - DNA, 120 bp, Homo sapiens; identical to SEQ ID NO: 51661
  misc_feature: 483 for SV(W|G) and 28S

SEQ ID NO: 83057 - DNA, 120 bp, Homo sapiens; identical to SEQ ID NO: 51662
  misc_feature: 483 for SV(W|G) and 28S

SEQ ID NO: 83058 - DNA, 120 bp, Homo sapiens; identical to SEQ ID NO: 51668
  misc_feature: 479 for SV(W|G) and 28S

SEQ ID NO: 83059 - DNA, 120 bp, Homo sapiens; identical to SEQ ID NO: 51669
  misc_feature: 478 for SV(W|G) and 28S

SEQ ID NO: 83060 - DNA, 120 bp, Homo sapiens; identical to SEQ ID NO: 51670
  misc_feature: 478 for SV(W|G) and 28S

SEQ ID NO: 83061 - DNA, 120 bp, Homo sapiens; identical to SEQ ID NO: 51671
  misc_feature: 477 for SV(W|G) and 28S

SEQ ID NO: 83062 - DNA, 120 bp, Homo sapiens; identical to SEQ ID NO: 51673
  misc_feature: 476 for SV(W|G) and 28S

SEQ ID NO: 83063 - DNA, 120 bp, Homo sapiens; identical to SEQ ID NO: 51676
  misc_feature: 473 for SV(W|G) and 28S

SEQ ID NO: 83064 - DNA, 120 bp, Homo sapiens; identical to SEQ ID NO: 51677
  misc_feature: 473 for SV(W|G) and 28S

SEQ ID NO: 83065 - DNA, 120 bp, Homo sapiens
  misc_feature: 472 for SV(W|G) and 28S
gccgggctccccgggggcggccgcgacgcccgccgcagctggggcgatccacgggaagggcccggctcgcgtccagagtcgccgccgccgccggccccccgggtgcccgggcccccctcg

SEQ ID NO: 83066 - DNA, 120 bp, Homo sapiens
  misc_feature: 472 for SV(W|G) and 28S
gaggacggacggacggacggacggggccccccgagccaccttccccgccgggccttcccagccgtcccggagccggtcgcggcgcaccgccgcggtggaaatgcgcccggcggcggccgg

SEQ ID NO: 83067 - DNA, 120 bp, Homo sapiens; identical to SEQ ID NO: 66985
  misc_feature: 470 for SV(W|G) and 28S

SEQ ID NO: 83068 - DNA, 120 bp, Homo sapiens
  misc_feature: 469 for SV(W|G) and 28S
tccaccgcggcggtgcgccgcgaccggctccgggacggctgggaaggcccggcggggaaggtggctcggggggccccgtccgtccgtccgtccgtcctcctcctcccccgtctccgcccc

SEQ ID NO: 83069 - DNA, 120 bp, Homo sapiens
  misc_feature: 469 for SV(W|G) and 28S
ccgccgggctccccgggggcggccgcgacgcccgccgcagctggggcgatccacgggaagggcccggctcgcgtccagagtcgccgccgccgccggccccccgggtgcccgggcccccct

SEQ ID NO: 83070 - DNA, 120 bp, Homo sapiens
  misc_feature: 468 for SV(W|G) and 28S
tgcgctcgctccgccgtccccctcttcgggggacgcgcgcgtggccccgagagaacctcccccgggcccgacggcgcgacccgcccggggcgcactggggacagtccgccccgccccccg

SEQ ID NO: 83071 - DNA, 120 bp, Homo sapiens
  misc_feature: 468 for SV(W|G) and 28S
ctcgctccgccgtccccctcttcgggggacgcgcgcgtggccccgagagaacctcccccgggcccgacggcgcgacccgcccggggcgcactggggacagtccgccccgccccccgaccc

SEQ ID NO: 83072 - DNA, 120 bp, Homo sapiens
  misc_feature: 468 for SV(W|G) and 28S
cccgccgggctccccgggggcggccgcgacgcccgccgcagctggggcgatccacgggaagggcccggctcgcgtccagagtcgccgccgccgccggccccccgggtgcccgggcccccc

SEQ ID NO: 83073 - DNA, 120 bp, Homo sapiens
  misc_feature: 468 for SV(W|G) and 28S
gggacggctgggaaggcccggcggggaaggtggctcggggggccccgtccgtccgtccgtccgtcctcctcctcccccgtctccgccccccggccccgcgtcctccctcgggagggcgcg

SEQ ID NO: 83074 - DNA, 120 bp, Homo sapiens
  misc_feature: 467 for SV(W|G) and 28S
tcgctccgccgtccccctcttcgggggacgcgcgcgtggccccgagagaacctcccccgggcccgacggcgcgacccgcccggggcgcactggggacagtccgccccgccccccgacccg

SEQ ID NO: 83075 - DNA, 120 bp, Homo sapiens
  misc_feature: 467 for SV(W|G) and 28S
aggaggacggacggacggacggacggggccccccgagccaccttccccgccgggccttcccagccgtcccggagccggtcgcggcgcaccgccgcggtggaaatgcgcccggcggcggcc

SEQ ID NO: 83076 - DNA, 120 bp, Homo sapiens
  misc_feature: 466 for SV(W|G) and 28S
ttccaccgcggcggtgcgccgcgaccggctccgggacggctgggaaggcccggcggggaaggtggctcggggggccccgtccgtccgtccgtccgtcctcctcctcccccgtctccgccc

SEQ ID NO: 83077 - DNA, 120 bp, Homo sapiens
  misc_feature: 465 for SV(W|G) and 28S
ggaggacggacggacggacggacggggccccccgagccaccttccccgccgggccttcccagccgtcccggagccggtcgcggcgcaccgccgcggtggaaatgcgcccggcggcggccg

SEQ ID NO: 83078 - DNA, 120 bp, Homo sapiens
  misc_feature: 465 for SV(W|G) and 28S
ccgggctccccgggggcggccgcgacgcccgccgcagctggggcgatccacgggaagggcccggctcgcgtccagagtcgccgccgccgccggccccccgggtgcccgggcccccctcgc

SEQ ID NO: 83079 - DNA, 120 bp, Homo sapiens
  misc_feature: 464 for SV(W|G) and 28S
ggcccggcggggaaggtggctcggggggccccgtccgtccgtccgtccgtcctcctcctcccccgtctccgccccccggccccgcgtcctccctcgggagggcgcgcgggtcggggcggc

SEQ ID NO: 83080 - DNA, 120 bp, Homo sapiens
  misc_feature: 464 for SV(W|G) and 28S
gaggaggacggacggacggacggacggggccccccgagccaccttccccgccgggccttcccagccgtcccggagccggtcgcggcgcaccgccgcggtggaaatgcgcccggcggcggc

SEQ ID NO: 83081 - DNA, 120 bp, Homo sapiens
  misc_feature: 459 for SV(W|G) and 28S
gctcgctccgccgtccccctcttcgggggacgcgcgcgtggccccgagagaacctcccccgggcccgacggcgcgacccgcccggggcgcactggggacagtccgccccgccccccgacc

SEQ ID NO: 83082 - DNA, 120 bp, Homo sapiens
  misc_feature: 458 for SV(W|G) and 28S
aggcccggcggggaaggtggctcggggggccccgtccgtccgtccgtccgtcctcctcctcccccgtctccgccccccggccccgcgtcctccctcgggagggcgcgcgggtcggggcgg

SEQ ID NO: 83083 - DNA, 120 bp, Homo sapiens
  misc_feature: 458 for SV(W|G) and 28S
aggacggacggacggacggacggggccccccgagccaccttccccgccgggccttcccagccgtcccggagccggtcgcggcgcaccgccgcggtggaaatgcgcccggcggcggccggt

SEQ ID NO: 83084 - DNA, 120 bp, Homo sapiens
  misc_feature: 457 for SV(W|G) and 28S
tttccaccgcggcggtgcgccgcgaccggctccgggacggctgggaaggcccggcggggaaggtggctcggggggccccgtccgtccgtccgtccgtcctcctcctcccccgtctccgcc

SEQ ID NO: 83085 - DNA, 120 bp, Homo sapiens
  misc_feature: 455 for SV(W|G) and 28S
ccccgggggcggccgcgacgcccgccgcagctggggcgatccacgggaagggcccggctcgcgtccagagtcgccgccgccgccggccccccgggtgcccgggcccccctcgcgggggac

SEQ ID NO: 83086 - DNA, 120 bp, Homo sapiens
  misc_feature: 454 for SV(W|G) and 28S
cgctcgctccgccgtccccctcttcgggggacgcgcgcgtggccccgagagaacctcccccgggcccgacggcgcgacccgcccggggcgcactggggacagtccgccccgccccccgac

SEQ ID NO: 83087 - DNA, 120 bp, Homo sapiens
  misc_feature: 454 for SV(W|G) and 28S
cgggctccccgggggcggccgcgacgcccgccgcagctggggcgatccacgggaagggcccggctcgcgtccagagtcgccgccgccgccggccccccgggtgcccgggcccccctcgcg

SEQ ID NO: 83088 - DNA, 120 bp, Homo sapiens
  misc_feature: 453 for SV(W|G) and 28S
ggctccccgggggcggccgcgacgcccgccgcagctggggcgatccacgggaagggcccggctcgcgtccagagtcgccgccgccgccggccccccgggtgcccgggcccccctcgcggg

SEQ ID NO: 83089 - DNA, 120 bp, Homo sapiens
  misc_feature: 453 for SV(W|G) and 28S
gctccccgggggcggccgcgacgcccgccgcagctggggcgatccacgggaagggcccggctcgcgtccagagtcgccgccgccgccggccccccgggtgcccgggcccccctcgcgggg

SEQ ID NO: 83090 - DNA, 120 bp, Homo sapiens
  misc_feature: 453 for SV(W|G) and 28S
ctccccgggggcggccgcgacgcccgccgcagctggggcgatccacgggaagggcccggctcgcgtccagagtcgccgccgccgccggccccccgggtgcccgggcccccctcgcggggg

SEQ ID NO: 83091 - DNA, 120 bp, Homo sapiens
  misc_feature: 452 for SV(W|G) and 28S
cggtcccccgcgaggggggcccgggcacccggggggccggcggcggcggcgactctggacgcgagccgggcccttcccgtggatcgccccagctgcggcgggcgtcgcggccgcccccgg

SEQ ID NO: 83092 - DNA, 120 bp, Homo sapiens
  misc_feature: 451 for SV(W|G) and 28S
gccgccgaccccgtgcgctcgctccgccgtccccctcttcgggggacgcgcgcgtggccccgagagaacctcccccgggcccgacggcgcgacccgcccggggcgcactggggacagtcc

SEQ ID NO: 83093 - DNA, 120 bp, Homo sapiens
  misc_feature: 450 for SV(W|G) and 28S
cccgggggcggccgcgacgcccgccgcagctggggcgatccacgggaagggcccggctcgcgtccagagtcgccgccgccgccggccccccgggtgcccgggcccccctcgcgggggacc

SEQ ID NO: 83094 - DNA, 120 bp, Homo sapiens
  misc_feature: 449 for SV(W|G) and 28S
gggctccccgggggcggccgcgacgcccgccgcagctggggcgatccacgggaagggcccggctcgcgtccagagtcgccgccgccgccggccccccgggtgcccgggcccccctcgcgg

SEQ ID NO: 83095 - DNA, 120 bp, Homo sapiens
  misc_feature: 449 for SV(W|G) and 28S
ggcacggtcccccgcgaggggggcccgggcacccggggggccggcggcggcggcgactctggacgcgagccgggcccttcccgtggatcgccccagctgcggcgggcgtcgcggccgccc

SEQ ID NO: 83096 - DNA, 120 bp, Homo sapiens
  misc_feature: 449 for SV(W|G) and 28S
gggcacggtcccccgcgaggggggcccgggcacccggggggccggcggcggcggcgactctggacgcgagccgggcccttcccgtggatcgccccagctgcggcgggcgtcgcggccgcc

SEQ ID NO: 83097 - DNA, 120 bp, Homo sapiens
  misc_feature: 448 for SV(W|G) and 28S
cgccgaccccgtgcgctcgctccgccgtccccctcttcgggggacgcgcgcgtggccccgagagaacctcccccgggcccgacggcgcgacccgcccggggcgcactggggacagtccgc

SEQ ID NO: 83098 - DNA, 120 bp, Homo sapiens
  misc_feature: 448 for SV(W|G) and 28S
ccgccgaccccgtgcgctcgctccgccgtccccctcttcgggggacgcgcgcgtggccccgagagaacctcccccgggcccgacggcgcgacccgcccggggcgcactggggacagtccg

SEQ ID NO: 83099 - DNA, 120 bp, Homo sapiens
  misc_feature: 447 for SV(W|G) and 28S
gccgaccccgtgcgctcgctccgccgtccccctcttcgggggacgcgcgcgtggccccgagagaacctcccccgggcccgacggcgcgacccgcccggggcgcactggggacagtccgcc

SEQ ID NO: 83100 - DNA, 120 bp, Homo sapiens
  misc_feature: 446 for SV(W|G) and 28S
cacggtcccccgcgaggggggcccgggcacccggggggccggcggcggcggcgactctggacgcgagccgggcccttcccgtggatcgccccagctgcggcgggcgtcgcggccgccccc

SEQ ID NO: 83101 - DNA, 120 bp, Homo sapiens
  misc_feature: 445 for SV(W|G) and 28S
gggggcacggtcccccgcgaggggggcccgggcacccggggggccggcggcggcggcgactctggacgcgagccgggcccttcccgtggatcgccccagctgcggcgggcgtcgcggccg

SEQ ID NO: 83102 - DNA, 120 bp, Homo sapiens
  misc_feature: 445 for SV(W|G) and 28S
gcacggtcccccgcgaggggggcccgggcacccggggggccggcggcggcggcgactctggacgcgagccgggcccttcccgtggatcgccccagctgcggcgggcgtcgcggccgcccc

SEQ ID NO: 83103 - DNA, 120 bp, Homo sapiens
  misc_feature: 445 for SV(W|G) and 28S
atttccaccgcggcggtgcgccgcgaccggctccgggacggctgggaaggcccggcggggaaggtggctcggggggccccgtccgtccgtccgtccgtcctcctcctcccccgtctccgc

SEQ ID NO: 83104 - DNA, 120 bp, Homo sapiens
  misc_feature: 444 for SV(W|G) and 28S
gcgctcgctccgccgtccccctcttcgggggacgcgcgcgtggccccgagagaacctcccccgggcccgacggcgcgacccgcccggggcgcactggggacagtccgccccgccccccga

SEQ ID NO: 83105 - DNA, 120 bp, Homo sapiens
  misc_feature: 444 for SV(W|G) and 28S
ggggcacggtcccccgcgaggggggcccgggcacccggggggccggcggcggcggcgactctggacgcgagccgggcccttcccgtggatcgccccagctgcggcgggcgtcgcggccgc

SEQ ID NO: 83106 - DNA, 120 bp, Homo sapiens
  misc_feature: 443 for SV(W|G) and 28S
cgggggcacggtcccccgcgaggggggcccgggcacccggggggccggcggcggcggcgactctggacgcgagccgggcccttcccgtggatcgccccagctgcggcgggcgtcgcggcc

SEQ ID NO: 83107 - DNA, 120 bp, Homo sapiens
  misc_feature: 442 for SV(W|G) and 28S
cgcatttccaccgcggcggtgcgccgcgaccggctccgggacggctgggaaggcccggcggggaaggtggctcggggggccccgtccgtccgtccgtccgtcctcctcctcccccgtctc

SEQ ID NO: 83108 - DNA, 120 bp, Homo sapiens
  misc_feature: 440 for SV(W|G) and 28S
gcatttccaccgcggcggtgcgccgcgaccggctccgggacggctgggaaggcccggcggggaaggtggctcggggggccccgtccgtccgtccgtccgtcctcctcctcccccgtctcc

SEQ ID NO: 83109 - DNA, 120 bp, Homo sapiens
  misc_feature: 440 for SV(W|G) and 28S
acggtcccccgcgaggggggcccgggcacccggggggccggcggcggcggcgactctggacgcgagccgggcccttcccgtggatcgccccagctgcggcgggcgtcgcggccgcccccg

SEQ ID NO: 83110 - DNA, 120 bp, Homo sapiens
  misc_feature: 437 for SV(W|G) and 28S
gcgggggcacggtcccccgcgaggggggcccgggcacccggggggccggcggcggcggcgactctggacgcgagccgggcccttcccgtggatcgccccagctgcggcgggcgtcgcggc

SEQ ID NO: 83111 - DNA, 120 bp, Homo sapiens
  misc_feature: 436 for SV(W|G) and 28S
catttccaccgcggcggtgcgccgcgaccggctccgggacggctgggaaggcccggcggggaaggtggctcggggggccccgtccgtccgtccgtccgtcctcctcctcccccgtctccg

SEQ ID NO: 83112 - DNA, 120 bp, Homo sapiens
  misc_feature: 430 for SV(W|G) and 28S
ggcgggggcacggtcccccgcgaggggggcccgggcacccggggggccggcggcggcggcgactctggacgcgagccgggcccttcccgtggatcgccccagctgcggcgggcgtcgcgg

SEQ ID NO: 83113 - DNA, 120 bp, Homo sapiens
  misc_feature: 427 for SV(W|G) and 28S
cggcgggggcacggtcccccgcgaggggggcccgggcacccggggggccggcggcggcggcgactctggacgcgagccgggcccttcccgtggatcgccccagctgcggcgggcgtcgcg

SEQ ID NO: 83114 - DNA, 120 bp, Homo sapiens
  misc_feature: 426 for SV(W|G) and 28S
aatcccgcccaggcggaacgatacggcagcgccgcggagcctcggttggcctcggatagccggtcccccgcctgtccccgccggcgggccgcccccccctccacgcgccccgcgcgcgcg

SEQ ID NO: 83115 - DNA, 120 bp, Homo sapiens
  misc_feature: 424 for SV(W|G) and 28S
gaatcccgcccaggcggaacgatacggcagcgccgcggagcctcggttggcctcggatagccggtcccccgcctgtccccgccggcgggccgcccccccctccacgcgccccgcgcgcgc

SEQ ID NO: 83116 - DNA, 120 bp, Homo sapiens
  misc_feature: 424 for SV(W|G) and 28S
atcccgcccaggcggaacgatacggcagcgccgcggagcctcggttggcctcggatagccggtcccccgcctgtccccgccggcgggccgcccccccctccacgcgccccgcgcgcgcgg

SEQ ID NO: 83117 - DNA, 120 bp, Homo sapiens
  misc_feature: 421 for SV(W|G) and 28S
ggcggcgggggcacggtcccccgcgaggggggcccgggcacccggggggccggcggcggcggcgactctggacgcgagccgggcccttcccgtggatcgccccagctgcggcgggcgtcg

SEQ ID NO: 83118 - DNA, 120 bp, Homo sapiens
  misc_feature: 419 for SV(W|G) and 28S
tccccgggggcggccgcgacgcccgccgcagctggggcgatccacgggaagggcccggctcgcgtccagagtcgccgccgccgccggccccccgggtgcccgggcccccctcgcggggga

SEQ ID NO: 83119 - DNA, 120 bp, Homo sapiens
  misc_feature: 419 for SV(W|G) and 28S
gcggcgggggcacggtcccccgcgaggggggcccgggcacccggggggccggcggcggcggcgactctggacgcgagccgggcccttcccgtggatcgccccagctgcggcgggcgtcgc

SEQ ID NO: 83120 - DNA, 120 bp, Homo sapiens
  misc_feature: 419 for SV(W|G) and 28S
cccggcggcgggggcacggtcccccgcgaggggggcccgggcacccggggggccggcggcggcggcgactctggacgcgagccgggcccttcccgtggatcgccccagctgcggcgggcg

SEQ ID NO: 83121 - DNA, 120 bp, Homo sapiens
  misc_feature: 414 for SV(W|G) and 28S
tcccgcccaggcggaacgatacggcagcgccgcggagcctcggttggcctcggatagccggtcccccgcctgtccccgccggcgggccgcccccccctccacgcgccccgcgcgcgcggg

SEQ ID NO: 83122 - DNA, 120 bp, Homo sapiens
  misc_feature: 413 for SV(W|G) and 28S
ccggcggcgggggcacggtcccccgcgaggggggcccgggcacccggggggccggcggcggcggcgactctggacgcgagccgggcccttcccgtggatcgccccagctgcggcgggcgt

SEQ ID NO: 83123 - DNA, 120 bp, Homo sapiens
  misc_feature: 409 for SV(W|G) and 28S
cggcggcgggggcacggtcccccgcgaggggggcccgggcacccggggggccggcggcggcggcgactctggacgcgagccgggcccttcccgtggatcgccccagctgcggcgggcgtc

SEQ ID NO: 83124 - DNA, 120 bp, Homo sapiens
  misc_feature: 408 for SV(W|G) and 28S
ggccccggcggcgggggcacggtcccccgcgaggggggcccgggcacccggggggccggcggcggcggcgactctggacgcgagccgggcccttcccgtggatcgccccagctgcggcgg

SEQ ID NO: 83125 - DNA, 120 bp, Homo sapiens; identical to SEQ ID NO: 67290
  misc_feature: 407 for SV(W|G) and 28S

SEQ ID NO: 83126 - DNA, 120 bp, Homo sapiens
  misc_feature: 406 for SV(W|G) and 28S
gcccaggcggaacgatacggcagcgccgcggagcctcggttggcctcggatagccggtcccccgcctgtccccgccggcgggccgcccccccctccacgcgccccgcgcgcgcgggaggg

SEQ ID NO: 83127 - DNA, 120 bp, Homo sapiens
  misc_feature: 405 for SV(W|G) and 28S
ccccggcggcgggggcacggtcccccgcgaggggggcccgggcacccggggggccggcggcggcggcgactctggacgcgagccgggcccttcccgtggatcgccccagctgcggcgggc

SEQ ID NO: 83128 - DNA, 120 bp, Homo sapiens
  misc_feature: 405 for SV(W|G) and 28S
cgcggggccccggcggcgggggcacggtcccccgcgaggggggcccgggcacccggggggccggcggcggcggcgactctggacgcgagccgggcccttcccgtggatcgccccagctgc

SEQ ID NO: 83129 - DNA, 120 bp, Homo sapiens
  misc_feature: 404 for SV(W|G) and 28S
cccaggcggaacgatacggcagcgccgcggagcctcggttggcctcggatagccggtcccccgcctgtccccgccggcgggccgcccccccctccacgcgccccgcgcgcgcgggagggc

SEQ ID NO: 83130 - DNA, 120 bp, Homo sapiens
  misc_feature: 403 for SV(W|G) and 28S
cccgcccaggcggaacgatacggcagcgccgcggagcctcggttggcctcggatagccggtcccccgcctgtccccgccggcgggccgcccccccctccacgcgccccgcgcgcgcggga

SEQ ID NO: 83131 - DNA, 120 bp, Homo sapiens
  misc_feature: 402 for SV(W|G) and 28S
cgcccaggcggaacgatacggcagcgccgcggagcctcggttggcctcggatagccggtcccccgcctgtccccgccggcgggccgcccccccctccacgcgccccgcgcgcgcgggagg

SEQ ID NO: 83132 - DNA, 120 bp, Homo sapiens
  misc_feature: 400 for SV(W|G) and 28S
ccgcccaggcggaacgatacggcagcgccgcggagcctcggttggcctcggatagccggtcccccgcctgtccccgccggcgggccgcccccccctccacgcgccccgcgcgcgcgggag

SEQ ID NO: 83133 - DNA, 120 bp, Homo sapiens
  misc_feature: 399 for SV(W|G) and 28S
gcggggccccggcggcgggggcacggtcccccgcgaggggggcccgggcacccggggggccggcggcggcggcgactctggacgcgagccgggcccttcccgtggatcgccccagctgcg

SEQ ID NO: 83134 - DNA, 120 bp, Homo sapiens
  misc_feature: 399 for SV(W|G) and 28S
caggcggaacgatacggcagcgccgcggagcctcggttggcctcggatagccggtcccccgcctgtccccgccggcgggccgcccccccctccacgcgccccgcgcgcgcgggagggcgc

SEQ ID NO: 83135 - DNA, 120 bp, Homo sapiens
  misc_feature: 398 for SV(W|G) and 28S
gccccggcggcgggggcacggtcccccgcgaggggggcccgggcacccggggggccggcggcggcggcgactctggacgcgagccgggcccttcccgtggatcgccccagctgcggcggg

SEQ ID NO: 83136 - DNA, 120 bp, Homo sapiens; identical to SEQ ID NO: 67332
  misc_feature: 397 for SV(W|G) and 28S

SEQ ID NO: 83137 - DNA, 120 bp, Homo sapiens
  misc_feature: 397 for SV(W|G) and 28S
ccaggcggaacgatacggcagcgccgcggagcctcggttggcctcggatagccggtcccccgcctgtccccgccggcgggccgcccccccctccacgcgccccgcgcgcgcgggagggcg

SEQ ID NO: 83138 - DNA, 120 bp, Homo sapiens
  misc_feature: 395 for SV(W|G) and 28S
cggggccccggcggcgggggcacggtcccccgcgaggggggcccgggcacccggggggccggcggcggcggcgactctggacgcgagccgggcccttcccgtggatcgccccagctgcgg

SEQ ID NO: 83139 - DNA, 120 bp, Homo sapiens
  misc_feature: 390 for SV(W|G) and 28S
aggcggaacgatacggcagcgccgcggagcctcggttggcctcggatagccggtcccccgcctgtccccgccggcgggccgcccccccctccacgcgccccgcgcgcgcgggagggcgcg

SEQ ID NO: 83140 - DNA, 120 bp, Homo sapiens
  misc_feature: 384 for SV(W|G) and 28S
ggcggaacgatacggcagcgccgcggagcctcggttggcctcggatagccggtcccccgcctgtccccgccggcgggccgcccccccctccacgcgccccgcgcgcgcgggagggcgcgt

SEQ ID NO: 83141 - DNA, 120 bp, Homo sapiens
  misc_feature: 382 for SV(W|G) and 28S
gcggaacgatacggcagcgccgcggagcctcggttggcctcggatagccggtcccccgcctgtccccgccggcgggccgcccccccctccacgcgccccgcgcgcgcgggagggcgcgtg

SEQ ID NO: 83142 - DNA, 120 bp, Homo sapiens
  misc_feature: 379 for SV(W|G) and 28S
gaacgatacggcagcgccgcggagcctcggttggcctcggatagccggtcccccgcctgtccccgccggcgggccgcccccccctccacgcgccccgcgcgcgcgggagggcgcgtgccc

SEQ ID NO: 83143 - DNA, 120 bp, Homo sapiens
  misc_feature: 374 for SV(W|G) and 28S
ggaacgatacggcagcgccgcggagcctcggttggcctcggatagccggtcccccgcctgtccccgccggcgggccgcccccccctccacgcgccccgcgcgcgcgggagggcgcgtgcc

SEQ ID NO: 83144 - DNA, 120 bp, Homo sapiens
  misc_feature: 372 for SV(W|G) and 28S
cggggcacgcgccctcccgcgcgcgcggggcgcgtggaggggggggcggcccgccggcggggacaggcgggggaccggctatccgaggccaaccgaggctccgcggcgctgccgtatcgt

SEQ ID NO: 83145 - DNA, 120 bp, Homo sapiens
  misc_feature: 371 for SV(W|G) and 28S
ggggcacgcgccctcccgcgcgcgcggggcgcgtggaggggggggcggcccgccggcggggacaggcgggggaccggctatccgaggccaaccgaggctccgcggcgctgccgtatcgtt

SEQ ID NO: 83146 - DNA, 120 bp, Homo sapiens
  misc_feature: 371 for SV(W|G) and 28S
cggaacgatacggcagcgccgcggagcctcggttggcctcggatagccggtcccccgcctgtccccgccggcgggccgcccccccctccacgcgccccgcgcgcgcgggagggcgcgtgc

SEQ ID NO: 83147 - DNA, 120 bp, Homo sapiens
  misc_feature: 368 for SV(W|G) and 28S
gcggggcacgcgccctcccgcgcgcgcggggcgcgtggaggggggggcggcccgccggcggggacaggcgggggaccggctatccgaggccaaccgaggctccgcggcgctgccgtatcg

SEQ ID NO: 83148 - DNA, 120 bp, Homo sapiens
  misc_feature: 367 for SV(W|G) and 28S
ggcggggcacgcgccctcccgcgcgcgcggggcgcgtggaggggggggcggcccgccggcggggacaggcgggggaccggctatccgaggccaaccgaggctccgcggcgctgccgtatc

SEQ ID NO: 83149 - DNA, 120 bp, Homo sapiens
  misc_feature: 357 for SV(W|G) and 28S
cggcggggcacgcgccctcccgcgcgcgcggggcgcgtggaggggggggcggcccgccggcggggacaggcgggggaccggctatccgaggccaaccgaggctccgcggcgctgccgtat

SEQ ID NO: 83150 - DNA, 120 bp, Homo sapiens
  misc_feature: 353 for SV(W|G) and 28S
gcggcggggcacgcgccctcccgcgcgcgcggggcgcgtggaggggggggcggcccgccggcggggacaggcgggggaccggctatccgaggccaaccgaggctccgcggcgctgccgta

SEQ ID NO: 83151 - DNA, 120 bp, Homo sapiens
  misc_feature: 351 for SV(W|G) and 28S
gcgcgcggcggggcacgcgccctcccgcgcgcgcggggcgcgtggaggggggggcggcccgccggcggggacaggcgggggaccggctatccgaggccaaccgaggctccgcggcgctgc

SEQ ID NO: 83152 - DNA, 120 bp, Homo sapiens
  misc_feature: 346 for SV(W|G) and 28S
cggcgcgcggcggggcacgcgccctcccgcgcgcgcggggcgcgtggaggggggggcggcccgccggcggggacaggcgggggaccggctatccgaggccaaccgaggctccgcggcgct

SEQ ID NO: 83153 - DNA, 120 bp, Homo sapiens
  misc_feature: 345 for SV(W|G) and 28S
ccggcgcgcggcggggcacgcgccctcccgcgcgcgcggggcgcgtggaggggggggcggcccgccggcggggacaggcgggggaccggctatccgaggccaaccgaggctccgcggcgc

SEQ ID NO: 83154 - DNA, 120 bp, Homo sapiens
  misc_feature: 344 for SV(W|G) and 28S
ggcgcgcggcggggcacgcgccctcccgcgcgcgcggggcgcgtggaggggggggcggcccgccggcggggacaggcgggggaccggctatccgaggccaaccgaggctccgcggcgctg

SEQ ID NO: 83155 - DNA, 120 bp, Homo sapiens
  misc_feature: 344 for SV(W|G) and 28S
cgcgcggcggggcacgcgccctcccgcgcgcgcggggcgcgtggaggggggggcggcccgccggcggggacaggcgggggaccggctatccgaggccaaccgaggctccgcggcgctgcc

SEQ ID NO: 83156 - DNA, 120 bp, Homo sapiens
  misc_feature: 343 for SV(W|G) and 28S
gcgcggcggggcacgcgccctcccgcgcgcgcggggcgcgtggaggggggggcggcccgccggcggggacaggcgggggaccggctatccgaggccaaccgaggctccgcggcgctgccg

SEQ ID NO: 83157 - DNA, 120 bp, Homo sapiens
  misc_feature: 342 for SV(W|G) and 28S
cccggcgcgcggcggggcacgcgccctcccgcgcgcgcggggcgcgtggaggggggggcggcccgccggcggggacaggcgggggaccggctatccgaggccaaccgaggctccgcggcg

SEQ ID NO: 83158 - DNA, 120 bp, Homo sapiens
  misc_feature: 339 for SV(W|G) and 28S
cgcggcggggcacgcgccctcccgcgcgcgcggggcgcgtggaggggggggcggcccgccggcggggacaggcgggggaccggctatccgaggccaaccgaggctccgcggcgctgccgt

SEQ ID NO: 83159 - DNA, 120 bp, Homo sapiens
  misc_feature: 336 for SV(W|G) and 28S
ccgcaccggaccccggtcccggcgcgcggcggggcacgcgccctcccgcgcgcgcggggcgcgtggaggggggggcggcccgccggcggggacaggcgggggaccggctatccgaggcca

SEQ ID NO: 83160 - DNA, 120 bp, Homo sapiens
  misc_feature: 334 for SV(W|G) and 28S
cgcaccggaccccggtcccggcgcgcggcggggcacgcgccctcccgcgcgcgcggggcgcgtggaggggggggcggcccgccggcggggacaggcgggggaccggctatccgaggccaa

SEQ ID NO: 83161 - DNA, 120 bp, Homo sapiens
  misc_feature: 332 for SV(W|G) and 28S
tcccggcgcgcggcggggcacgcgccctcccgcgcgcgcggggcgcgtggaggggggggcggcccgccggcggggacaggcgggggaccggctatccgaggccaaccgaggctccgcggc

SEQ ID NO: 83162 - DNA, 120 bp, Homo sapiens
  misc_feature: 328 for SV(W|G) and 28S
gcaccggaccccggtcccggcgcgcggcggggcacgcgccctcccgcgcgcgcggggcgcgtggaggggggggcggcccgccggcggggacaggcgggggaccggctatccgaggccaac

SEQ ID NO: 83163 - DNA, 120 bp, Homo sapiens
  misc_feature: 326 for SV(W|G) and 28S
ctccgcaccggaccccggtcccggcgcgcggcggggcacgcgccctcccgcgcgcgcggggcgcgtggaggggggggcggcccgccggcggggacaggcgggggaccggctatccgaggc

SEQ ID NO: 83164 - DNA, 120 bp, Homo sapiens
  misc_feature: 325 for SV(W|G) and 28S
caccggaccccggtcccggcgcgcggcggggcacgcgccctcccgcgcgcgcggggcgcgtggaggggggggcggcccgccggcggggacaggcgggggaccggctatccgaggccaacc

SEQ ID NO: 83165 - DNA, 120 bp, Homo sapiens
  misc_feature: 324 for SV(W|G) and 28S
gtcccggcgcgcggcggggcacgcgccctcccgcgcgcgcggggcgcgtggaggggggggcggcccgccggcggggacaggcgggggaccggctatccgaggccaaccgaggctccgcgg

SEQ ID NO: 83166 - DNA, 120 bp, Homo sapiens
  misc_feature: 321 for SV(W|G) and 28S
tccgcaccggaccccggtcccggcgcgcggcggggcacgcgccctcccgcgcgcgcggggcgcgtggaggggggggcggcccgccggcggggacaggcgggggaccggctatccgaggcc

SEQ ID NO: 83167 - DNA, 120 bp, Homo sapiens
  misc_feature: 320 for SV(W|G) and 28S
ccggtcccggcgcgcggcggggcacgcgccctcccgcgcgcgcggggcgcgtggaggggggggcggcccgccggcggggacaggcgggggaccggctatccgaggccaaccgaggctccg

SEQ ID NO: 83168 - DNA, 120 bp, Homo sapiens
  misc_feature: 319 for SV(W|G) and 28S
ggtcccggcgcgcggcggggcacgcgccctcccgcgcgcgcggggcgcgtggaggggggggcggcccgccggcggggacaggcgggggaccggctatccgaggccaaccgaggctccgcg

SEQ ID NO: 83169 - DNA, 120 bp, Homo sapiens
  misc_feature: 319 for SV(W|G) and 28S
cccggtcccggcgcgcggcggggcacgcgccctcccgcgcgcgcggggcgcgtggaggggggggcggcccgccggcggggacaggcgggggaccggctatccgaggccaaccgaggctcc

SEQ ID NO: 83170 - DNA, 120 bp, Homo sapiens
  misc_feature: 317 for SV(W|G) and 28S
cccccgcctgtccccgccggcgggccgcccccccctccacgcgccccgcgcgcgcgggagggcgcgtgccccgccgcgcgccgggaccggggtccggtgcggagtgcccttcgtcctggg

SEQ ID NO: 83171 - DNA, 120 bp, Homo sapiens
  misc_feature: 316 for SV(W|G) and 28S
cgcctgtccccgccggcgggccgcccccccctccacgcgccccgcgcgcgcgggagggcgcgtgccccgccgcgcgccgggaccggggtccggtgcggagtgcccttcgtcctgggaaac

SEQ ID NO: 83172 - DNA, 120 bp, Homo sapiens
  misc_feature: 315 for SV(W|G) and 28S
cggtcccggcgcgcggcggggcacgcgccctcccgcgcgcgcggggcgcgtggaggggggggcggcccgccggcggggacaggcgggggaccggctatccgaggccaaccgaggctccgc

SEQ ID NO: 83173 - DNA, 120 bp, Homo sapiens
  misc_feature: 315 for SV(W|G) and 28S
ccccggtcccggcgcgcggcggggcacgcgccctcccgcgcgcgcggggcgcgtggaggggggggcggcccgccggcggggacaggcgggggaccggctatccgaggccaaccgaggctc

SEQ ID NO: 83174 - DNA, 120 bp, Homo sapiens
  misc_feature: 314 for SV(W|G) and 28S
gcctgtccccgccggcgggccgcccccccctccacgcgccccgcgcgcgcgggagggcgcgtgccccgccgcgcgccgggaccggggtccggtgcggagtgcccttcgtcctgggaaacg

SEQ ID NO: 83175 - DNA, 120 bp, Homo sapiens; identical to SEQ ID NO: 51678
  misc_feature: 1934 for SV(W|G) and mtDNA

SEQ ID NO: 83176 - DNA, 120 bp, Homo sapiens; identical to SEQ ID NO: 51679
  misc_feature: 1931 for SV(W|G) and mtDNA

SEQ ID NO: 83177 - DNA, 120 bp, Homo sapiens; identical to SEQ ID NO: 51680
  misc_feature: 1922 for SV(W|G) and mtDNA

SEQ ID NO: 83178 - DNA, 120 bp, Homo sapiens; identical to SEQ ID NO: 51681
  misc_feature: 1907 for SV(W|G) and mtDNA

SEQ ID NO: 83179 - DNA, 120 bp, Homo sapiens; identical to SEQ ID NO: 51682
  misc_feature: 1904 for SV(W|G) and mtDNA

SEQ ID NO: 83180 - DNA, 120 bp, Homo sapiens; identical to SEQ ID NO: 51683
  misc_feature: 1889 for SV(W|G) and mtDNA

SEQ ID NO: 83181 - DNA, 120 bp, Homo sapiens; identical to SEQ ID NO: 51684
  misc_feature: 1889 for SV(W|G) and mtDNA

SEQ ID NO: 83182 - DNA, 120 bp, Homo sapiens; identical to SEQ ID NO: 51685
  misc_feature: 1886 for SV(W|G) and mtDNA

SEQ ID NO: 83183 - DNA, 120 bp, Homo sapiens; identical to SEQ ID NO: 51686
  misc_feature: 1877 for SV(W|G) and mtDNA

SEQ ID NO: 83184 - DNA, 120 bp, Homo sapiens; identical to SEQ ID NO: 51687
  misc_feature: 1873 for SV(W|G) and mtDNA

SEQ ID NO: 83185 - DNA, 120 bp, Homo sapiens; identical to SEQ ID NO: 51688
  misc_feature: 1867 for SV(W|G) and mtDNA

SEQ ID NO: 83186 - DNA, 120 bp, Homo sapiens; identical to SEQ ID NO: 51689
  misc_feature: 1866 for SV(W|G) and mtDNA

SEQ ID NO: 83187 - DNA, 120 bp, Homo sapiens; identical to SEQ ID NO: 51690
  misc_feature: 1860 for SV(W|G) and mtDNA

SEQ ID NO: 83188 - DNA, 120 bp, Homo sapiens; identical to SEQ ID NO: 51691
  misc_feature: 1856 for SV(W|G) and mtDNA

SEQ ID NO: 83189 - DNA, 120 bp, Homo sapiens; identical to SEQ ID NO: 51692
  misc_feature: 1856 for SV(W|G) and mtDNA

SEQ ID NO: 83190 - DNA, 120 bp, Homo sapiens; identical to SEQ ID NO: 51693
  misc_feature: 1854 for SV(W|G) and mtDNA

SEQ ID NO: 83191 - DNA, 120 bp, Homo sapiens; identical to SEQ ID NO: 51694
  misc_feature: 1850 for SV(W|G) and mtDNA

SEQ ID NO: 83192 - DNA, 120 bp, Homo sapiens; identical to SEQ ID NO: 51702
  misc_feature: 1824 for SV(W|G) and mtDNA

SEQ ID NO: 83193 - DNA, 120 bp, Homo sapiens; identical to SEQ ID NO: 51703
  misc_feature: 1822 for SV(W|G) and mtDNA

SEQ ID NO: 83194 - DNA, 120 bp, Homo sapiens; identical to SEQ ID NO: 51704
  misc_feature: 1819 for SV(W|G) and mtDNA

SEQ ID NO: 83195 - DNA, 120 bp, Homo sapiens; identical to SEQ ID NO: 51705
  misc_feature: 1813 for SV(W|G) and mtDNA

SEQ ID NO: 83196 - DNA, 120 bp, Homo sapiens; identical to SEQ ID NO: 51706
  misc_feature: 1813 for SV(W|G) and mtDNA

SEQ ID NO: 83197 - DNA, 120 bp, Homo sapiens; identical to SEQ ID NO: 51707
  misc_feature: 1805 for SV(W|G) and mtDNA

SEQ ID NO: 83198 - DNA, 120 bp, Homo sapiens; identical to SEQ ID NO: 51710
  misc_feature: 1803 for SV(W|G) and mtDNA

SEQ ID NO: 83199 - DNA, 120 bp, Homo sapiens; identical to SEQ ID NO: 51716
  misc_feature: 1799 for SV(W|G) and mtDNA

SEQ ID NO: 83200 - DNA, 120 bp, Homo sapiens; identical to SEQ ID NO: 51723
  misc_feature: 1794 for SV(W|G) and mtDNA

SEQ ID NO: 83201 - DNA, 120 bp, Homo sapiens; identical to SEQ ID NO: 51725
  misc_feature: 1792 for SV(W|G) and mtDNA

SEQ ID NO: 83202 - DNA, 120 bp, Homo sapiens; identical to SEQ ID NO: 51729
  misc_feature: 1791 for SV(W|G) and mtDNA

SEQ ID NO: 83203 - DNA, 120 bp, Homo sapiens; identical to SEQ ID NO: 51742
  misc_feature: 1778 for SV(W|G) and mtDNA

SEQ ID NO: 83204 - DNA, 120 bp, Homo sapiens; identical to SEQ ID NO: 51744
  misc_feature: 1777 for SV(W|G) and mtDNA

SEQ ID NO: 83205 - DNA, 120 bp, Homo sapiens; identical to SEQ ID NO: 51745
  misc_feature: 1777 for SV(W|G) and mtDNA

SEQ ID NO: 83206 - DNA, 120 bp, Homo sapiens; identical to SEQ ID NO: 51754
  misc_feature: 1771 for SV(W|G) and mtDNA

SEQ ID NO: 83207 - DNA, 120 bp, Homo sapiens; identical to SEQ ID NO: 51761
  misc_feature: 1767 for SV(W|G) and mtDNA

SEQ ID NO: 83208 - DNA, 120 bp, Homo sapiens; identical to SEQ ID NO: 51769
  misc_feature: 1761 for SV(W|G) and mtDNA

SEQ ID NO: 83209 - DNA, 120 bp, Homo sapiens; identical to SEQ ID NO: 51781
  misc_feature: 1756 for SV(W|G) and mtDNA

SEQ ID NO: 83210 - DNA, 120 bp, Homo sapiens; identical to SEQ ID NO: 51795
  misc_feature: 1750 for SV(W|G) and mtDNA

SEQ ID NO: 83211 - DNA, 120 bp, Homo sapiens; identical to SEQ ID NO: 51809
  misc_feature: 1743 for SV(W|G) and mtDNA

SEQ ID NO: 83212 - DNA, 120 bp, Homo sapiens; identical to SEQ ID NO: 51826
  misc_feature: 1735 for SV(W|G) and mtDNA

SEQ ID NO: 83213 - DNA, 120 bp, Homo sapiens; identical to SEQ ID NO: 51833
  misc_feature: 1732 for SV(W|G) and mtDNA

SEQ ID NO: 83214 - DNA, 120 bp, Homo sapiens; identical to SEQ ID NO: 51872
  misc_feature: 1721 for SV(W|G) and mtDNA

SEQ ID NO: 83215 - DNA, 120 bp, Homo sapiens; identical to SEQ ID NO: 51924
  misc_feature: 1709 for SV(W|G) and mtDNA

SEQ ID NO: 83216 - DNA, 120 bp, Homo sapiens; identical to SEQ ID NO: 51969
  misc_feature: 1700 for SV(W|G) and mtDNA

SEQ ID NO: 83217 - DNA, 120 bp, Homo sapiens; identical to SEQ ID NO: 52016
  misc_feature: 1690 for SV(W|G) and mtDNA

SEQ ID NO: 83218 - DNA, 120 bp, Homo sapiens; identical to SEQ ID NO: 52055
  misc_feature: 1685 for SV(W|G) and mtDNA

SEQ ID NO: 83219 - DNA, 120 bp, Homo sapiens; identical to SEQ ID NO: 52263
  misc_feature: 1664 for SV(W|G) and mtDNA

SEQ ID NO: 83220 - DNA, 120 bp, Homo sapiens; identical to SEQ ID NO: 52267
  misc_feature: 1664 for SV(W|G) and mtDNA

SEQ ID NO: 83221 - DNA, 120 bp, Homo sapiens; identical to SEQ ID NO: 52311
  misc_feature: 1661 for SV(W|G) and mtDNA

SEQ ID NO: 83222 - DNA, 120 bp, Homo sapiens; identical to SEQ ID NO: 52340
  misc_feature: 1658 for SV(W|G) and mtDNA

SEQ ID NO: 83223 - DNA, 120 bp, Homo sapiens; identical to SEQ ID NO: 52357
  misc_feature: 1657 for SV(W|G) and mtDNA

SEQ ID NO: 83224 - DNA, 120 bp, Homo sapiens; identical to SEQ ID NO: 52367
  misc_feature: 1656 for SV(W|G) and mtDNA

SEQ ID NO: 83225 - DNA, 120 bp, Homo sapiens; identical to SEQ ID NO: 52401
  misc_feature: 1653 for SV(W|G) and mtDNA

SEQ ID NO: 83226 - DNA, 120 bp, Homo sapiens; identical to SEQ ID NO: 52468
  misc_feature: 1649 for SV(W|G) and mtDNA

SEQ ID NO: 83227 - DNA, 120 bp, Homo sapiens; identical to SEQ ID NO: 52534
  misc_feature: 1644 for SV(W|G) and mtDNA

SEQ ID NO: 83228 - DNA, 120 bp, Homo sapiens; identical to SEQ ID NO: 52541
  misc_feature: 1644 for SV(W|G) and mtDNA

SEQ ID NO: 83229 - DNA, 120 bp, Homo sapiens; identical to SEQ ID NO: 52551
  misc_feature: 1643 for SV(W|G) and mtDNA

SEQ ID NO: 83230 - DNA, 120 bp, Homo sapiens; identical to SEQ ID NO: 52568
  misc_feature: 1642 for SV(W|G) and mtDNA

SEQ ID NO: 83231 - DNA, 120 bp, Homo sapiens; identical to SEQ ID NO: 52608
  misc_feature: 1639 for SV(W|G) and mtDNA

SEQ ID NO: 83232 - DNA, 120 bp, Homo sapiens; identical to SEQ ID NO: 52642
  misc_feature: 1637 for SV(W|G) and mtDNA

SEQ ID NO: 83233 - DNA, 120 bp, Homo sapiens; identical to SEQ ID NO: 52820
  misc_feature: 1626 for SV(W|G) and mtDNA

SEQ ID NO: 83234 - DNA, 120 bp, Homo sapiens; identical to SEQ ID NO: 53296
  misc_feature: 1599 for SV(W|G) and mtDNA

SEQ ID NO: 83235 - DNA, 120 bp, Homo sapiens; identical to SEQ ID NO: 53533
  misc_feature: 1587 for SV(W|G) and mtDNA

SEQ ID NO: 83236 - DNA, 120 bp, Homo sapiens; identical to SEQ ID NO: 53892
  misc_feature: 1569 for SV(W|G) and mtDNA

SEQ ID NO: 83237 - DNA, 120 bp, Homo sapiens; identical to SEQ ID NO: 54046
  misc_feature: 1564 for SV(W|G) and mtDNA

SEQ ID NO: 83238 - DNA, 120 bp, Homo sapiens; identical to SEQ ID NO: 54543
  misc_feature: 1544 for SV(W|G) and mtDNA

SEQ ID NO: 83239 - DNA, 120 bp, Homo sapiens; identical to SEQ ID NO: 54647
  misc_feature: 1540 for SV(W|G) and mtDNA

SEQ ID NO: 83240 - DNA, 120 bp, Homo sapiens; identical to SEQ ID NO: 54832
  misc_feature: 1532 for SV(W|G) and mtDNA

SEQ ID NO: 83241 - DNA, 120 bp, Homo sapiens; identical to SEQ ID NO: 54849
  misc_feature: 1532 for SV(W|G) and mtDNA

SEQ ID NO: 83242 - DNA, 120 bp, Homo sapiens; identical to SEQ ID NO: 54937
  misc_feature: 1528 for SV(W|G) and mtDNA

SEQ ID NO: 83243 - DNA, 120 bp, Homo sapiens; identical to SEQ ID NO: 54989
  misc_feature: 1525 for SV(W|G) and mtDNA

SEQ ID NO: 83244 - DNA, 120 bp, Homo sapiens; identical to SEQ ID NO: 55009
  misc_feature: 1525 for SV(W|G) and mtDNA

SEQ ID NO: 83245 - DNA, 120 bp, Homo sapiens; identical to SEQ ID NO: 55036
  misc_feature: 1524 for SV(W|G) and mtDNA

SEQ ID NO: 83246 - DNA, 120 bp, Homo sapiens; identical to SEQ ID NO: 55116
  misc_feature: 1520 for SV(W|G) and mtDNA

SEQ ID NO: 83247 - DNA, 120 bp, Homo sapiens; identical to SEQ ID NO: 55131
  misc_feature: 1520 for SV(W|G) and mtDNA

SEQ ID NO: 83248 - DNA, 120 bp, Homo sapiens; identical to SEQ ID NO: 55247
  misc_feature: 1515 for SV(W|G) and mtDNA

SEQ ID NO: 83249 - DNA, 120 bp, Homo sapiens; identical to SEQ ID NO: 55256
  misc_feature: 1514 for SV(W|G) and mtDNA

SEQ ID NO: 83250 - DNA, 120 bp, Homo sapiens; identical to SEQ ID NO: 55286
  misc_feature: 1513 for SV(W|G) and mtDNA

SEQ ID NO: 83251 - DNA, 120 bp, Homo sapiens; identical to SEQ ID NO: 55316
  misc_feature: 1512 for SV(W|G) and mtDNA

SEQ ID NO: 83252 - DNA, 120 bp, Homo sapiens; identical to SEQ ID NO: 55319
  misc_feature: 1512 for SV(W|G) and mtDNA

SEQ ID NO: 83253 - DNA, 120 bp, Homo sapiens; identical to SEQ ID NO: 55461
  misc_feature: 1506 for SV(W|G) and mtDNA

SEQ ID NO: 83254 - DNA, 120 bp, Homo sapiens; identical to SEQ ID NO: 55484
  misc_feature: 1505 for SV(W|G) and mtDNA

SEQ ID NO: 83255 - DNA, 120 bp, Homo sapiens; identical to SEQ ID NO: 55534
  misc_feature: 1503 for SV(W|G) and mtDNA

SEQ ID NO: 83256 - DNA, 120 bp, Homo sapiens; identical to SEQ ID NO: 55564
  misc_feature: 1502 for SV(W|G) and mtDNA

SEQ ID NO: 83257 - DNA, 120 bp, Homo sapiens; identical to SEQ ID NO: 55653
  misc_feature: 1499 for SV(W|G) and mtDNA

SEQ ID NO: 83258 - DNA, 120 bp, Homo sapiens; identical to SEQ ID NO: 55702
  misc_feature: 1497 for SV(W|G) and mtDNA

SEQ ID NO: 83259 - DNA, 120 bp, Homo sapiens; identical to SEQ ID NO: 55795
  misc_feature: 1493 for SV(W|G) and mtDNA

SEQ ID NO: 83260 - DNA, 120 bp, Homo sapiens; identical to SEQ ID NO: 55839
  misc_feature: 1492 for SV(W|G) and mtDNA

SEQ ID NO: 83261 - DNA, 120 bp, Homo sapiens; identical to SEQ ID NO: 55944
  misc_feature: 1488 for SV(W|G) and mtDNA

SEQ ID NO: 83262 - DNA, 120 bp, Homo sapiens; identical to SEQ ID NO: 56055
  misc_feature: 1484 for SV(W|G) and mtDNA

SEQ ID NO: 83263 - DNA, 120 bp, Homo sapiens; identical to SEQ ID NO: 56337
  misc_feature: 1473 for SV(W|G) and mtDNA

SEQ ID NO: 83264 - DNA, 120 bp, Homo sapiens; identical to SEQ ID NO: 56525
  misc_feature: 1467 for SV(W|G) and mtDNA

SEQ ID NO: 83265 - DNA, 120 bp, Homo sapiens; identical to SEQ ID NO: 56664
  misc_feature: 1462 for SV(W|G) and mtDNA

SEQ ID NO: 83266 - DNA, 120 bp, Homo sapiens; identical to SEQ ID NO: 57097
  misc_feature: 1449 for SV(W|G) and mtDNA

SEQ ID NO: 83267 - DNA, 120 bp, Homo sapiens; identical to SEQ ID NO: 57125
  misc_feature: 1449 for SV(W|G) and mtDNA

SEQ ID NO: 83268 - DNA, 120 bp, Homo sapiens; identical to SEQ ID NO: 57243
  misc_feature: 1445 for SV(W|G) and mtDNA

SEQ ID NO: 83269 - DNA, 120 bp, Homo sapiens; identical to SEQ ID NO: 57328
  misc_feature: 1442 for SV(W|G) and mtDNA

SEQ ID NO: 83270 - DNA, 120 bp, Homo sapiens; identical to SEQ ID NO: 57333
  misc_feature: 1442 for SV(W|G) and mtDNA

SEQ ID NO: 83271 - DNA, 120 bp, Homo sapiens; identical to SEQ ID NO: 59307
  misc_feature: 1373 for SV(W|G) and mtDNA

SEQ ID NO: 83272 - DNA, 120 bp, Homo sapiens; identical to SEQ ID NO: 59688
  misc_feature: 1359 for SV(W|G) and mtDNA

SEQ ID NO: 83273 - DNA, 120 bp, Homo sapiens; identical to SEQ ID NO: 59695
  misc_feature: 1359 for SV(W|G) and mtDNA

SEQ ID NO: 83274 - DNA, 120 bp, Homo sapiens; identical to SEQ ID NO: 59795
  misc_feature: 1355 for SV(W|G) and mtDNA

SEQ ID NO: 83275 - DNA, 120 bp, Homo sapiens; identical to SEQ ID NO: 60174
  misc_feature: 1341 for SV(W|G) and mtDNA

SEQ ID NO: 83276 - DNA, 120 bp, Homo sapiens; identical to SEQ ID NO: 61830
  misc_feature: 1257 for SV(W|G) and mtDNA

SEQ ID NO: 83277 - DNA, 120 bp, Homo sapiens; identical to SEQ ID NO: 61850
  misc_feature: 1256 for SV(W|G) and mtDNA

SEQ ID NO: 83278 - DNA, 120 bp, Homo sapiens; identical to SEQ ID NO: 61888
  misc_feature: 1254 for SV(W|G) and mtDNA

SEQ ID NO: 83279 - DNA, 120 bp, Homo sapiens; identical to SEQ ID NO: 62144
  misc_feature: 1231 for SV(W|G) and mtDNA

SEQ ID NO: 83280 - DNA, 120 bp, Homo sapiens; identical to SEQ ID NO: 62214
  misc_feature: 1222 for SV(W|G) and mtDNA

SEQ ID NO: 83281 - DNA, 120 bp, Homo sapiens; identical to SEQ ID NO: 62262
  misc_feature: 1216 for SV(W|G) and mtDNA

SEQ ID NO: 83282 - DNA, 120 bp, Homo sapiens; identical to SEQ ID NO: 62275
  misc_feature: 1214 for SV(W|G) and mtDNA

SEQ ID NO: 83283 - DNA, 120 bp, Homo sapiens; identical to SEQ ID NO: 62337
  misc_feature: 1205 for SV(W|G) and mtDNA

SEQ ID NO: 83284 - DNA, 120 bp, Homo sapiens; identical to SEQ ID NO: 62364
  misc_feature: 1201 for SV(W|G) and mtDNA

SEQ ID NO: 83285 - DNA, 120 bp, Homo sapiens; identical to SEQ ID NO: 62397
  misc_feature: 1195 for SV(W|G) and mtDNA

SEQ ID NO: 83286 - DNA, 120 bp, Homo sapiens; identical to SEQ ID NO: 62402
  misc_feature: 1194 for SV(W|G) and mtDNA

SEQ ID NO: 83287 - DNA, 120 bp, Homo sapiens; identical to SEQ ID NO: 62426
  misc_feature: 1188 for SV(W|G) and mtDNA

SEQ ID NO: 83288 - DNA, 120 bp, Homo sapiens; identical to SEQ ID NO: 62427
  misc_feature: 1188 for SV(W|G) and mtDNA

SEQ ID NO: 83289 - DNA, 120 bp, Homo sapiens; identical to SEQ ID NO: 62443
  misc_feature: 1185 for SV(W|G) and mtDNA

SEQ ID NO: 83290 - DNA, 120 bp, Homo sapiens; identical to SEQ ID NO: 62504
  misc_feature: 1172 for SV(W|G) and mtDNA

SEQ ID NO: 83291 - DNA, 120 bp, Homo sapiens; identical to SEQ ID NO: 62582
  misc_feature: 1151 for SV(W|G) and mtDNA

SEQ ID NO: 83292 - DNA, 120 bp, Homo sapiens; identical to SEQ ID NO: 62613
  misc_feature: 1138 for SV(W|G) and mtDNA

SEQ ID NO: 83293 - DNA, 120 bp, Homo sapiens; identical to SEQ ID NO: 62645
  misc_feature: 1127 for SV(W|G) and mtDNA

SEQ ID NO: 83294 - DNA, 120 bp, Homo sapiens; identical to SEQ ID NO: 62697
  misc_feature: 1109 for SV(W|G) and mtDNA

SEQ ID NO: 83295 - DNA, 120 bp, Homo sapiens; identical to SEQ ID NO: 62715
  misc_feature: 1100 for SV(W|G) and mtDNA

SEQ ID NO: 83296 - DNA, 120 bp, Homo sapiens; identical to SEQ ID NO: 62716
  misc_feature: 1100 for SV(W|G) and mtDNA

SEQ ID NO: 83297 - DNA, 120 bp, Homo sapiens; identical to SEQ ID NO: 62719
  misc_feature: 1099 for SV(W|G) and mtDNA

SEQ ID NO: 83298 - DNA, 120 bp, Homo sapiens; identical to SEQ ID NO: 62721
  misc_feature: 1099 for SV(W|G) and mtDNA

SEQ ID NO: 83299 - DNA, 120 bp, Homo sapiens; identical to SEQ ID NO: 62726
  misc_feature: 1095 for SV(W|G) and mtDNA

SEQ ID NO: 83300 - DNA, 120 bp, Homo sapiens; identical to SEQ ID NO: 62731
  misc_feature: 1091 for SV(W|G) and mtDNA

SEQ ID NO: 83301 - DNA, 120 bp, Homo sapiens; identical to SEQ ID NO: 62738
  misc_feature: 1089 for SV(W|G) and mtDNA

SEQ ID NO: 83302 - DNA, 120 bp, Homo sapiens; identical to SEQ ID NO: 62741
  misc_feature: 1087 for SV(W|G) and mtDNA

SEQ ID NO: 83303 - DNA, 120 bp, Homo sapiens; identical to SEQ ID NO: 62745
  misc_feature: 1086 for SV(W|G) and mtDNA

SEQ ID NO: 83304 - DNA, 120 bp, Homo sapiens; identical to SEQ ID NO: 62746
  misc_feature: 1084 for SV(W|G) and mtDNA

SEQ ID NO: 83305 - DNA, 120 bp, Homo sapiens; identical to SEQ ID NO: 62748
  misc_feature: 1083 for SV(W|G) and mtDNA

SEQ ID NO: 83306 - DNA, 120 bp, Homo sapiens; identical to SEQ ID NO: 62751
  misc_feature: 1081 for SV(W|G) and mtDNA

SEQ ID NO: 83307 - DNA, 120 bp, Homo sapiens; identical to SEQ ID NO: 62753
  misc_feature: 1079 for SV(W|G) and mtDNA

SEQ ID NO: 83308 - DNA, 120 bp, Homo sapiens; identical to SEQ ID NO: 62755
  misc_feature: 1079 for SV(W|G) and mtDNA

SEQ ID NO: 83309 - DNA, 120 bp, Homo sapiens; identical to SEQ ID NO: 62757
  misc_feature: 1079 for SV(W|G) and mtDNA

SEQ ID NO: 83310 - DNA, 120 bp, Homo sapiens; identical to SEQ ID NO: 62758
  misc_feature: 1079 for SV(W|G) and mtDNA

SEQ ID NO: 83311 - DNA, 120 bp, Homo sapiens; identical to SEQ ID NO: 62760
  misc_feature: 1079 for SV(W|G) and mtDNA

SEQ ID NO: 83312 - DNA, 120 bp, Homo sapiens; identical to SEQ ID NO: 62764
  misc_feature: 1076 for SV(W|G) and mtDNA

SEQ ID NO: 83313 - DNA, 120 bp, Homo sapiens; identical to SEQ ID NO: 62765
  misc_feature: 1075 for SV(W|G) and mtDNA

SEQ ID NO: 83314 - DNA, 120 bp, Homo sapiens; identical to SEQ ID NO: 62769
  misc_feature: 1071 for SV(W|G) and mtDNA

SEQ ID NO: 83315 - DNA, 120 bp, Homo sapiens; identical to SEQ ID NO: 62772
  misc_feature: 1068 for SV(W|G) and mtDNA

SEQ ID NO: 83316 - DNA, 120 bp, Homo sapiens; identical to SEQ ID NO: 62774
  misc_feature: 1064 for SV(W|G) and mtDNA

SEQ ID NO: 83317 - DNA, 120 bp, Homo sapiens; identical to SEQ ID NO: 62776
  misc_feature: 1063 for SV(W|G) and mtDNA

SEQ ID NO: 83318 - DNA, 120 bp, Homo sapiens; identical to SEQ ID NO: 62779
  misc_feature: 1058 for SV(W|G) and mtDNA

SEQ ID NO: 83319 - DNA, 120 bp, Homo sapiens; identical to SEQ ID NO: 62780
  misc_feature: 1057 for SV(W|G) and mtDNA

SEQ ID NO: 83320 - DNA, 120 bp, Homo sapiens; identical to SEQ ID NO: 62781
  misc_feature: 1052 for SV(W|G) and mtDNA

SEQ ID NO: 83321 - DNA, 120 bp, Homo sapiens; identical to SEQ ID NO: 62784
  misc_feature: 1044 for SV(W|G) and mtDNA

SEQ ID NO: 83322 - DNA, 120 bp, Homo sapiens; identical to SEQ ID NO: 62791
  misc_feature: 1026 for SV(W|G) and mtDNA

SEQ ID NO: 83323 - DNA, 120 bp, Homo sapiens; identical to SEQ ID NO: 62795
  misc_feature: 1015 for SV(W|G) and mtDNA

SEQ ID NO: 83324 - DNA, 120 bp, Homo sapiens; identical to SEQ ID NO: 62802
  misc_feature: 1001 for SV(W|G) and mtDNA

SEQ ID NO: 83325 - DNA, 120 bp, Homo sapiens; identical to SEQ ID NO: 62834
  misc_feature: 962 for SV(W|G) and mtDNA

SEQ ID NO: 83326 - DNA, 120 bp, Homo sapiens; identical to SEQ ID NO: 62881
  misc_feature: 863 for SV(W|G) and mtDNA

SEQ ID NO: 83327 - DNA, 120 bp, Homo sapiens; identical to SEQ ID NO: 62882
  misc_feature: 858 for SV(W|G) and mtDNA

SEQ ID NO: 83328 - DNA, 120 bp, Homo sapiens; identical to SEQ ID NO: 62900
  misc_feature: 824 for SV(W|G) and mtDNA

SEQ ID NO: 83329 - DNA, 120 bp, Homo sapiens; identical to SEQ ID NO: 62904
  misc_feature: 820 for SV(W|G) and mtDNA

SEQ ID NO: 83330 - DNA, 120 bp, Homo sapiens; identical to SEQ ID NO: 62910
  misc_feature: 815 for SV(W|G) and mtDNA

SEQ ID NO: 83331 - DNA, 120 bp, Homo sapiens; identical to SEQ ID NO: 62915
  misc_feature: 810 for SV(W|G) and mtDNA

SEQ ID NO: 83332 - DNA, 120 bp, Homo sapiens; identical to SEQ ID NO: 62928
  misc_feature: 792 for SV(W|G) and mtDNA

SEQ ID NO: 83333 - DNA, 120 bp, Homo sapiens; identical to SEQ ID NO: 62929
  misc_feature: 791 for SV(W|G) and mtDNA

SEQ ID NO: 83334 - DNA, 120 bp, Homo sapiens; identical to SEQ ID NO: 62944
  misc_feature: 775 for SV(W|G) and mtDNA

SEQ ID NO: 83335 - DNA, 120 bp, Homo sapiens; identical to SEQ ID NO: 62954
  misc_feature: 761 for SV(W|G) and mtDNA

SEQ ID NO: 83336 - DNA, 120 bp, Homo sapiens; identical to SEQ ID NO: 62963
  misc_feature: 755 for SV(W|G) and mtDNA

SEQ ID NO: 83337 - DNA, 120 bp, Homo sapiens; identical to SEQ ID NO: 62964
  misc_feature: 754 for SV(W|G) and mtDNA

SEQ ID NO: 83338 - DNA, 120 bp, Homo sapiens; identical to SEQ ID NO: 63071
  misc_feature: 546 for SV(W|G) and mtDNA

SEQ ID NO: 83339 - DNA, 120 bp, Homo sapiens; identical to SEQ ID NO: 63072
  misc_feature: 545 for SV(W|G) and mtDNA

SEQ ID NO: 83340 - DNA, 120 bp, Homo sapiens; identical to SEQ ID NO: 63073
  misc_feature: 542 for SV(W|G) and mtDNA

SEQ ID NO: 83341 - DNA, 120 bp, Homo sapiens; identical to SEQ ID NO: 63074
  misc_feature: 539 for SV(W|G) and mtDNA

SEQ ID NO: 83342 - DNA, 120 bp, Homo sapiens; identical to SEQ ID NO: 63075
  misc_feature: 538 for SV(W|G) and mtDNA

SEQ ID NO: 83343 - DNA, 120 bp, Homo sapiens; identical to SEQ ID NO: 63076
  misc_feature: 534 for SV(W|G) and mtDNA

SEQ ID NO: 83344 - DNA, 120 bp, Homo sapiens; identical to SEQ ID NO: 63077
  misc_feature: 534 for SV(W|G) and mtDNA

SEQ ID NO: 83345 - DNA, 120 bp, Homo sapiens; identical to SEQ ID NO: 63078
  misc_feature: 533 for SV(W|G) and mtDNA

SEQ ID NO: 83346 - DNA, 120 bp, Homo sapiens; identical to SEQ ID NO: 63080
  misc_feature: 530 for SV(W|G) and mtDNA

SEQ ID NO: 83347 - DNA, 120 bp, Homo sapiens; identical to SEQ ID NO: 63081
  misc_feature: 528 for SV(W|G) and mtDNA

SEQ ID NO: 83348 - DNA, 120 bp, Homo sapiens; identical to SEQ ID NO: 63083
  misc_feature: 525 for SV(W|G) and mtDNA

SEQ ID NO: 83349 - DNA, 120 bp, Homo sapiens; identical to SEQ ID NO: 63084
  misc_feature: 523 for SV(W|G) and mtDNA

SEQ ID NO: 83350 - DNA, 120 bp, Homo sapiens; identical to SEQ ID NO: 63088
  misc_feature: 519 for SV(W|G) and mtDNA

SEQ ID NO: 83351 - DNA, 120 bp, Homo sapiens; identical to SEQ ID NO: 63090
  misc_feature: 513 for SV(W|G) and mtDNA

SEQ ID NO: 83352 - DNA, 120 bp, Homo sapiens; identical to SEQ ID NO: 63096
  misc_feature: 504 for SV(W|G) and mtDNA

SEQ ID NO: 83353 - DNA, 120 bp, Homo sapiens; identical to SEQ ID NO: 63102
  misc_feature: 502 for SV(W|G) and mtDNA

SEQ ID NO: 83354 - DNA, 120 bp, Homo sapiens; identical to SEQ ID NO: 63105
  misc_feature: 501 for SV(W|G) and mtDNA

SEQ ID NO: 83355 - DNA, 120 bp, Homo sapiens; identical to SEQ ID NO: 63110
  misc_feature: 500 for SV(W|G) and mtDNA

SEQ ID NO: 83356 - DNA, 120 bp, Homo sapiens; identical to SEQ ID NO: 63115
  misc_feature: 499 for SV(W|G) and mtDNA

SEQ ID NO: 83357 - DNA, 120 bp, Homo sapiens; identical to SEQ ID NO: 63119
  misc_feature: 497 for SV(W|G) and mtDNA

SEQ ID NO: 83358 - DNA, 120 bp, Homo sapiens; identical to SEQ ID NO: 63141
  misc_feature: 488 for SV(W|G) and mtDNA

SEQ ID NO: 83359 - DNA, 120 bp, Homo sapiens; identical to SEQ ID NO: 63143
  misc_feature: 488 for SV(W|G) and mtDNA

SEQ ID NO: 83360 - DNA, 120 bp, Homo sapiens; identical to SEQ ID NO: 63144
  misc_feature: 487 for SV(W|G) and mtDNA

SEQ ID NO: 83361 - DNA, 120 bp, Homo sapiens; identical to SEQ ID NO: 63153
  misc_feature: 484 for SV(W|G) and mtDNA

SEQ ID NO: 83362 - DNA, 120 bp, Homo sapiens; identical to SEQ ID NO: 63155
  misc_feature: 483 for SV(W|G) and mtDNA

SEQ ID NO: 83363 - DNA, 120 bp, Homo sapiens; identical to SEQ ID NO: 63165
  misc_feature: 478 for SV(W|G) and mtDNA

SEQ ID NO: 83364 - DNA, 120 bp, Homo sapiens; identical to SEQ ID NO: 63170
  misc_feature: 477 for SV(W|G) and mtDNA

SEQ ID NO: 83365 - DNA, 120 bp, Homo sapiens; identical to SEQ ID NO: 63171
  misc_feature: 475 for SV(W|G) and mtDNA

SEQ ID NO: 83366 - DNA, 120 bp, Homo sapiens; identical to SEQ ID NO: 63174
  misc_feature: 471 for SV(W|G) and mtDNA

SEQ ID NO: 83367 - DNA, 120 bp, Homo sapiens; identical to SEQ ID NO: 63176
  misc_feature: 470 for SV(W|G) and mtDNA

SEQ ID NO: 83368 - DNA, 120 bp, Homo sapiens; identical to SEQ ID NO: 63178
  misc_feature: 469 for SV(W|G) and mtDNA

SEQ ID NO: 83369 - DNA, 120 bp, Homo sapiens; identical to SEQ ID NO: 63179
  misc_feature: 469 for SV(W|G) and mtDNA

SEQ ID NO: 83370 - DNA, 120 bp, Homo sapiens; identical to SEQ ID NO: 63182
  misc_feature: 468 for SV(W|G) and mtDNA

SEQ ID NO: 83371 - DNA, 120 bp, Homo sapiens; identical to SEQ ID NO: 63188
  misc_feature: 465 for SV(W|G) and mtDNA

SEQ ID NO: 83372 - DNA, 120 bp, Homo sapiens; identical to SEQ ID NO: 63189
  misc_feature: 464 for SV(W|G) and mtDNA

SEQ ID NO: 83373 - DNA, 120 bp, Homo sapiens; identical to SEQ ID NO: 63191
  misc_feature: 462 for SV(W|G) and mtDNA

SEQ ID NO: 83374 - DNA, 120 bp, Homo sapiens; identical to SEQ ID NO: 63196
  misc_feature: 458 for SV(W|G) and mtDNA

SEQ ID NO: 83375 - DNA, 120 bp, Homo sapiens; identical to SEQ ID NO: 63197
  misc_feature: 457 for SV(W|G) and mtDNA

SEQ ID NO: 83376 - DNA, 120 bp, Homo sapiens; identical to SEQ ID NO: 63200
  misc_feature: 456 for SV(W|G) and mtDNA

SEQ ID NO: 83377 - DNA, 120 bp, Homo sapiens; identical to SEQ ID NO: 63201
  misc_feature: 454 for SV(W|G) and mtDNA

SEQ ID NO: 83378 - DNA, 120 bp, Homo sapiens; identical to SEQ ID NO: 63202
  misc_feature: 452 for SV(W|G) and mtDNA

SEQ ID NO: 83379 - DNA, 120 bp, Homo sapiens; identical to SEQ ID NO: 63204
  misc_feature: 452 for SV(W|G) and mtDNA

SEQ ID NO: 83380 - DNA, 120 bp, Homo sapiens; identical to SEQ ID NO: 63205
  misc_feature: 451 for SV(W|G) and mtDNA

SEQ ID NO: 83381 - DNA, 120 bp, Homo sapiens; identical to SEQ ID NO: 63207
  misc_feature: 449 for SV(W|G) and mtDNA

SEQ ID NO: 83382 - DNA, 120 bp, Homo sapiens; identical to SEQ ID NO: 63212
  misc_feature: 443 for SV(W|G) and mtDNA

SEQ ID NO: 83383 - DNA, 120 bp, Homo sapiens; identical to SEQ ID NO: 63213
  misc_feature: 440 for SV(W|G) and mtDNA

SEQ ID NO: 83384 - DNA, 120 bp, Homo sapiens; identical to SEQ ID NO: 63215
  misc_feature: 437 for SV(W|G) and mtDNA

SEQ ID NO: 83385 - DNA, 120 bp, Homo sapiens; identical to SEQ ID NO: 63216
  misc_feature: 435 for SV(W|G) and mtDNA

SEQ ID NO: 83386 - DNA, 120 bp, Homo sapiens; identical to SEQ ID NO: 63217
  misc_feature: 435 for SV(W|G) and mtDNA

SEQ ID NO: 83387 - DNA, 120 bp, Homo sapiens; identical to SEQ ID NO: 63218
  misc_feature: 434 for SV(W|G) and mtDNA

SEQ ID NO: 83388 - DNA, 120 bp, Homo sapiens; identical to SEQ ID NO: 63219
  misc_feature: 433 for SV(W|G) and mtDNA

SEQ ID NO: 83389 - DNA, 120 bp, Homo sapiens; identical to SEQ ID NO: 63220
  misc_feature: 433 for SV(W|G) and mtDNA

SEQ ID NO: 83390 - DNA, 120 bp, Homo sapiens; identical to SEQ ID NO: 63221
  misc_feature: 432 for SV(W|G) and mtDNA

SEQ ID NO: 83391 - DNA, 120 bp, Homo sapiens; identical to SEQ ID NO: 63222
  misc_feature: 432 for SV(W|G) and mtDNA

SEQ ID NO: 83392 - DNA, 120 bp, Homo sapiens; identical to SEQ ID NO: 63223
  misc_feature: 431 for SV(W|G) and mtDNA

SEQ ID NO: 83393 - DNA, 120 bp, Homo sapiens; identical to SEQ ID NO: 63225
  misc_feature: 430 for SV(W|G) and mtDNA

SEQ ID NO: 83394 - DNA, 120 bp, Homo sapiens; identical to SEQ ID NO: 63226
  misc_feature: 429 for SV(W|G) and mtDNA

SEQ ID NO: 83395 - DNA, 120 bp, Homo sapiens; identical to SEQ ID NO: 63228
  misc_feature: 428 for SV(W|G) and mtDNA

SEQ ID NO: 83396 - DNA, 120 bp, Homo sapiens; identical to SEQ ID NO: 63229
  misc_feature: 428 for SV(W|G) and mtDNA

SEQ ID NO: 83397 - DNA, 120 bp, Homo sapiens; identical to SEQ ID NO: 63231
  misc_feature: 426 for SV(W|G) and mtDNA

SEQ ID NO: 83398 - DNA, 120 bp, Homo sapiens; identical to SEQ ID NO: 63232
  misc_feature: 426 for SV(W|G) and mtDNA

SEQ ID NO: 83399 - DNA, 120 bp, Homo sapiens; identical to SEQ ID NO: 63233
  misc_feature: 426 for SV(W|G) and mtDNA

SEQ ID NO: 83400 - DNA, 120 bp, Homo sapiens; identical to SEQ ID NO: 63234
  misc_feature: 426 for SV(W|G) and mtDNA

SEQ ID NO: 83401 - DNA, 120 bp, Homo sapiens; identical to SEQ ID NO: 63235
  misc_feature: 426 for SV(W|G) and mtDNA

SEQ ID NO: 83402 - DNA, 120 bp, Homo sapiens; identical to SEQ ID NO: 63238
  misc_feature: 425 for SV(W|G) and mtDNA

SEQ ID NO: 83403 - DNA, 120 bp, Homo sapiens; identical to SEQ ID NO: 63239
  misc_feature: 424 for SV(W|G) and mtDNA

SEQ ID NO: 83404 - DNA, 120 bp, Homo sapiens; identical to SEQ ID NO: 63240
  misc_feature: 423 for SV(W|G) and mtDNA

SEQ ID NO: 83405 - DNA, 120 bp, Homo sapiens; identical to SEQ ID NO: 63241
  misc_feature: 423 for SV(W|G) and mtDNA

SEQ ID NO: 83406 - DNA, 120 bp, Homo sapiens; identical to SEQ ID NO: 63242
  misc_feature: 420 for SV(W|G) and mtDNA

SEQ ID NO: 83407 - DNA, 120 bp, Homo sapiens; identical to SEQ ID NO: 63243
  misc_feature: 420 for SV(W|G) and mtDNA

SEQ ID NO: 83408 - DNA, 120 bp, Homo sapiens; identical to SEQ ID NO: 63244
  misc_feature: 418 for SV(W|G) and mtDNA

SEQ ID NO: 83409 - DNA, 120 bp, Homo sapiens; identical to SEQ ID NO: 63245
  misc_feature: 414 for SV(W|G) and mtDNA

SEQ ID NO: 83410 - DNA, 120 bp, Homo sapiens; identical to SEQ ID NO: 63246
  misc_feature: 414 for SV(W|G) and mtDNA

SEQ ID NO: 83411 - DNA, 120 bp, Homo sapiens; identical to SEQ ID NO: 63247
  misc_feature: 411 for SV(W|G) and mtDNA

SEQ ID NO: 83412 - DNA, 120 bp, Homo sapiens; identical to SEQ ID NO: 66090
  misc_feature: 523 for SV(C|G) and 28S

SEQ ID NO: 83413 - DNA, 120 bp, Homo sapiens; identical to SEQ ID NO: 66147
  misc_feature: 516 for SV(C|G) and 28S

SEQ ID NO: 83414 - DNA, 120 bp, Homo sapiens; identical to SEQ ID NO: 66188
  misc_feature: 511 for SV(C|G) and 28S

SEQ ID NO: 83415 - DNA, 120 bp, Homo sapiens; identical to SEQ ID NO: 66196
  misc_feature: 510 for SV(C|G) and 28S

SEQ ID NO: 83416 - DNA, 120 bp, Homo sapiens; identical to SEQ ID NO: 66206
  misc_feature: 509 for SV(C|G) and 28S

SEQ ID NO: 83417 - DNA, 120 bp, Homo sapiens; identical to SEQ ID NO: 66226
  misc_feature: 507 for SV(C|G) and 28S

SEQ ID NO: 83418 - DNA, 120 bp, Homo sapiens; identical to SEQ ID NO: 66229
  misc_feature: 507 for SV(C|G) and 28S

SEQ ID NO: 83419 - DNA, 120 bp, Homo sapiens; identical to SEQ ID NO: 66235
  misc_feature: 506 for SV(C|G) and 28S

SEQ ID NO: 83420 - DNA, 120 bp, Homo sapiens; identical to SEQ ID NO: 66253
  misc_feature: 504 for SV(C|G) and 28S

SEQ ID NO: 83421 - DNA, 120 bp, Homo sapiens; identical to SEQ ID NO: 66260
  misc_feature: 504 for SV(C|G) and 28S

SEQ ID NO: 83422 - DNA, 120 bp, Homo sapiens; identical to SEQ ID NO: 66272
  misc_feature: 503 for SV(C|G) and 28S

SEQ ID NO: 83423 - DNA, 120 bp, Homo sapiens; identical to SEQ ID NO: 66285
  misc_feature: 502 for SV(C|G) and 28S

SEQ ID NO: 83424 - DNA, 120 bp, Homo sapiens; identical to SEQ ID NO: 66286
  misc_feature: 502 for SV(C|G) and 28S

SEQ ID NO: 83425 - DNA, 120 bp, Homo sapiens; identical to SEQ ID NO: 66302
  misc_feature: 500 for SV(C|G) and 28S

SEQ ID NO: 83426 - DNA, 120 bp, Homo sapiens; identical to SEQ ID NO: 66309
  misc_feature: 500 for SV(C|G) and 28S

SEQ ID NO: 83427 - DNA, 120 bp, Homo sapiens; identical to SEQ ID NO: 66319
  misc_feature: 499 for SV(C|G) and 28S

SEQ ID NO: 83428 - DNA, 120 bp, Homo sapiens; identical to SEQ ID NO: 66321
  misc_feature: 499 for SV(C|G) and 28S

SEQ ID NO: 83429 - DNA, 120 bp, Homo sapiens; identical to SEQ ID NO: 66329
  misc_feature: 498 for SV(C|G) and 28S

SEQ ID NO: 83430 - DNA, 120 bp, Homo sapiens; identical to SEQ ID NO: 66333
  misc_feature: 498 for SV(C|G) and 28S

SEQ ID NO: 83431 - DNA, 120 bp, Homo sapiens; identical to SEQ ID NO: 66338
  misc_feature: 498 for SV(C|G) and 28S

SEQ ID NO: 83432 - DNA, 120 bp, Homo sapiens; identical to SEQ ID NO: 66341
  misc_feature: 498 for SV(C|G) and 28S

SEQ ID NO: 83433 - DNA, 120 bp, Homo sapiens; identical to SEQ ID NO: 66351
  misc_feature: 497 for SV(C|G) and 28S

SEQ ID NO: 83434 - DNA, 120 bp, Homo sapiens; identical to SEQ ID NO: 66362
  misc_feature: 496 for SV(C|G) and 28S

SEQ ID NO: 83435 - DNA, 120 bp, Homo sapiens; identical to SEQ ID NO: 51569
  misc_feature: 495 for SV(C|G) and 28S

SEQ ID NO: 83436 - DNA, 120 bp, Homo sapiens; identical to SEQ ID NO: 66379
  misc_feature: 495 for SV(C|G) and 28S

SEQ ID NO: 83437 - DNA, 120 bp, Homo sapiens; identical to SEQ ID NO: 66380
  misc_feature: 495 for SV(C|G) and 28S

SEQ ID NO: 83438 - DNA, 120 bp, Homo sapiens; identical to SEQ ID NO: 66381
  misc_feature: 495 for SV(C|G) and 28S

SEQ ID NO: 83439 - DNA, 120 bp, Homo sapiens; identical to SEQ ID NO: 66388
  misc_feature: 494 for SV(C|G) and 28S

SEQ ID NO: 83440 - DNA, 120 bp, Homo sapiens; identical to SEQ ID NO: 66389
  misc_feature: 494 for SV(C|G) and 28S

SEQ ID NO: 83441 - DNA, 120 bp, Homo sapiens; identical to SEQ ID NO: 66390
  misc_feature: 494 for SV(C|G) and 28S

SEQ ID NO: 83442 - DNA, 120 bp, Homo sapiens; identical to SEQ ID NO: 66395
  misc_feature: 494 for SV(C|G) and 28S

SEQ ID NO: 83443 - DNA, 120 bp, Homo sapiens; identical to SEQ ID NO: 66405
  misc_feature: 493 for SV(C|G) and 28S

SEQ ID NO: 83444 - DNA, 120 bp, Homo sapiens; identical to SEQ ID NO: 66414
  misc_feature: 492 for SV(C|G) and 28S

SEQ ID NO: 83445 - DNA, 120 bp, Homo sapiens; identical to SEQ ID NO: 66415
  misc_feature: 492 for SV(C|G) and 28S

SEQ ID NO: 83446 - DNA, 120 bp, Homo sapiens; identical to SEQ ID NO: 66416
  misc_feature: 492 for SV(C|G) and 28S

SEQ ID NO: 83447 - DNA, 120 bp, Homo sapiens; identical to SEQ ID NO: 66425
  misc_feature: 491 for SV(C|G) and 28S

SEQ ID NO: 83448 - DNA, 120 bp, Homo sapiens; identical to SEQ ID NO: 66427
  misc_feature: 491 for SV(C|G) and 28S

SEQ ID NO: 83449 - DNA, 120 bp, Homo sapiens; identical to SEQ ID NO: 66440
  misc_feature: 489 for SV(C|G) and 28S

SEQ ID NO: 83450 - DNA, 120 bp, Homo sapiens; identical to SEQ ID NO: 66449
  misc_feature: 488 for SV(C|G) and 28S

SEQ ID NO: 83451 - DNA, 120 bp, Homo sapiens; identical to SEQ ID NO: 66455
  misc_feature: 487 for SV(C|G) and 28S

SEQ ID NO: 83452 - DNA, 120 bp, Homo sapiens; identical to SEQ ID NO: 66456
  misc_feature: 487 for SV(C|G) and 28S

SEQ ID NO: 83453 - DNA, 120 bp, Homo sapiens; identical to SEQ ID NO: 66457
  misc_feature: 487 for SV(C|G) and 28S

SEQ ID NO: 83454 - DNA, 120 bp, Homo sapiens; identical to SEQ ID NO: 66467
  misc_feature: 486 for SV(C|G) and 28S

SEQ ID NO: 83455 - DNA, 120 bp, Homo sapiens; identical to SEQ ID NO: 66471
  misc_feature: 486 for SV(C|G) and 28S

SEQ ID NO: 83456 - DNA, 120 bp, Homo sapiens; identical to SEQ ID NO: 51626
  misc_feature: 486 for SV(C|G) and 28S

SEQ ID NO: 83457 - DNA, 120 bp, Homo sapiens; identical to SEQ ID NO: 66479
  misc_feature: 485 for SV(C|G) and 28S

SEQ ID NO: 83458 - DNA, 120 bp, Homo sapiens; identical to SEQ ID NO: 66486
  misc_feature: 485 for SV(C|G) and 28S

SEQ ID NO: 83459 - DNA, 120 bp, Homo sapiens; identical to SEQ ID NO: 66491
  misc_feature: 485 for SV(C|G) and 28S

SEQ ID NO: 83460 - DNA, 120 bp, Homo sapiens; identical to SEQ ID NO: 66496
  misc_feature: 484 for SV(C|G) and 28S

SEQ ID NO: 83461 - DNA, 120 bp, Homo sapiens; identical to SEQ ID NO: 51590
  misc_feature: 483 for SV(C|G) and 28S

SEQ ID NO: 83462 - DNA, 120 bp, Homo sapiens; identical to SEQ ID NO: 66512
  misc_feature: 483 for SV(C|G) and 28S

SEQ ID NO: 83463 - DNA, 120 bp, Homo sapiens; identical to SEQ ID NO: 66539
  misc_feature: 480 for SV(C|G) and 28S

SEQ ID NO: 83464 - DNA, 120 bp, Homo sapiens; identical to SEQ ID NO: 66545
  misc_feature: 480 for SV(C|G) and 28S

SEQ ID NO: 83465 - DNA, 120 bp, Homo sapiens; identical to SEQ ID NO: 66548
  misc_feature: 479 for SV(C|G) and 28S

SEQ ID NO: 83466 - DNA, 120 bp, Homo sapiens; identical to SEQ ID NO: 66549
  misc_feature: 479 for SV(C|G) and 28S

SEQ ID NO: 83467 - DNA, 120 bp, Homo sapiens; identical to SEQ ID NO: 66557
  misc_feature: 478 for SV(C|G) and 28S

SEQ ID NO: 83468 - DNA, 120 bp, Homo sapiens; identical to SEQ ID NO: 66562
  misc_feature: 478 for SV(C|G) and 28S

SEQ ID NO: 83469 - DNA, 120 bp, Homo sapiens; identical to SEQ ID NO: 66568
  misc_feature: 477 for SV(C|G) and 28S

SEQ ID NO: 83470 - DNA, 120 bp, Homo sapiens; identical to SEQ ID NO: 66569
  misc_feature: 477 for SV(C|G) and 28S

SEQ ID NO: 83471 - DNA, 120 bp, Homo sapiens; identical to SEQ ID NO: 66584
  misc_feature: 475 for SV(C|G) and 28S

SEQ ID NO: 83472 - DNA, 120 bp, Homo sapiens; identical to SEQ ID NO: 51661
  misc_feature: 471 for SV(C|G) and 28S

SEQ ID NO: 83473 - DNA, 120 bp, Homo sapiens; identical to SEQ ID NO: 66629
  misc_feature: 470 for SV(C|G) and 28S

SEQ ID NO: 83474 - DNA, 120 bp, Homo sapiens; identical to SEQ ID NO: 51676
  misc_feature: 470 for SV(C|G) and 28S

SEQ ID NO: 83475 - DNA, 120 bp, Homo sapiens; identical to SEQ ID NO: 51671
  misc_feature: 469 for SV(C|G) and 28S

SEQ ID NO: 83476 - DNA, 120 bp, Homo sapiens; identical to SEQ ID NO: 66650
  misc_feature: 468 for SV(C|G) and 28S

SEQ ID NO: 83477 - DNA, 120 bp, Homo sapiens; identical to SEQ ID NO: 66661
  misc_feature: 467 for SV(C|G) and 28S

SEQ ID NO: 83478 - DNA, 120 bp, Homo sapiens; identical to SEQ ID NO: 51637
  misc_feature: 467 for SV(C|G) and 28S

SEQ ID NO: 83479 - DNA, 120 bp, Homo sapiens; identical to SEQ ID NO: 66720
  misc_feature: 462 for SV(C|G) and 28S

SEQ ID NO: 83480 - DNA, 120 bp, Homo sapiens; identical to SEQ ID NO: 66731
  misc_feature: 461 for SV(C|G) and 28S

SEQ ID NO: 83481 - DNA, 120 bp, Homo sapiens; identical to SEQ ID NO: 66753
  misc_feature: 459 for SV(C|G) and 28S

SEQ ID NO: 83482 - DNA, 120 bp, Homo sapiens; identical to SEQ ID NO: 66770
  misc_feature: 458 for SV(C|G) and 28S

SEQ ID NO: 83483 - DNA, 120 bp, Homo sapiens; identical to SEQ ID NO: 66782
  misc_feature: 457 for SV(C|G) and 28S

SEQ ID NO: 83484 - DNA, 120 bp, Homo sapiens; identical to SEQ ID NO: 66802
  misc_feature: 456 for SV(C|G) and 28S

SEQ ID NO: 83485 - DNA, 120 bp, Homo sapiens; identical to SEQ ID NO: 66808
  misc_feature: 455 for SV(C|G) and 28S

SEQ ID NO: 83486 - DNA, 120 bp, Homo sapiens; identical to SEQ ID NO: 66838
  misc_feature: 452 for SV(C|G) and 28S

SEQ ID NO: 83487 - DNA, 120 bp, Homo sapiens; identical to SEQ ID NO: 66843
  misc_feature: 452 for SV(C|G) and 28S

SEQ ID NO: 83488 - DNA, 120 bp, Homo sapiens; identical to SEQ ID NO: 66854
  misc_feature: 451 for SV(C|G) and 28S

SEQ ID NO: 83489 - DNA, 120 bp, Homo sapiens; identical to SEQ ID NO: 66867
  misc_feature: 450 for SV(C|G) and 28S

SEQ ID NO: 83490 - DNA, 120 bp, Homo sapiens; identical to SEQ ID NO: 66915
  misc_feature: 445 for SV(C|G) and 28S

SEQ ID NO: 83491 - DNA, 120 bp, Homo sapiens; identical to SEQ ID NO: 66929
  misc_feature: 444 for SV(C|G) and 28S

SEQ ID NO: 83492 - DNA, 120 bp, Homo sapiens; identical to SEQ ID NO: 66940
  misc_feature: 443 for SV(C|G) and 28S

SEQ ID NO: 83493 - DNA, 120 bp, Homo sapiens; identical to SEQ ID NO: 66944
  misc_feature: 443 for SV(C|G) and 28S

SEQ ID NO: 83494 - DNA, 120 bp, Homo sapiens; identical to SEQ ID NO: 66961
  misc_feature: 441 for SV(C|G) and 28S

SEQ ID NO: 83495 - DNA, 120 bp, Homo sapiens; identical to SEQ ID NO: 66971
  misc_feature: 440 for SV(C|G) and 28S

SEQ ID NO: 83496 - DNA, 120 bp, Homo sapiens; identical to SEQ ID NO: 66972
  misc_feature: 440 for SV(C|G) and 28S

SEQ ID NO: 83497 - DNA, 120 bp, Homo sapiens; identical to SEQ ID NO: 66976
  misc_feature: 440 for SV(C|G) and 28S

SEQ ID NO: 83498 - DNA, 120 bp, Homo sapiens; identical to SEQ ID NO: 66985
  misc_feature: 439 for SV(C|G) and 28S

SEQ ID NO: 83499 - DNA, 120 bp, Homo sapiens; identical to SEQ ID NO: 66993
  misc_feature: 438 for SV(C|G) and 28S

SEQ ID NO: 83500 - DNA, 120 bp, Homo sapiens; identical to SEQ ID NO: 67006
  misc_feature: 437 for SV(C|G) and 28S

SEQ ID NO: 83501 - DNA, 120 bp, Homo sapiens; identical to SEQ ID NO: 67007
  misc_feature: 437 for SV(C|G) and 28S

SEQ ID NO: 83502 - DNA, 120 bp, Homo sapiens; identical to SEQ ID NO: 67024
  misc_feature: 436 for SV(C|G) and 28S

SEQ ID NO: 83503 - DNA, 120 bp, Homo sapiens; identical to SEQ ID NO: 67053
  misc_feature: 433 for SV(C|G) and 28S

SEQ ID NO: 83504 - DNA, 120 bp, Homo sapiens; identical to SEQ ID NO: 67054
  misc_feature: 433 for SV(C|G) and 28S

SEQ ID NO: 83505 - DNA, 120 bp, Homo sapiens; identical to SEQ ID NO: 67067
  misc_feature: 432 for SV(C|G) and 28S

SEQ ID NO: 83506 - DNA, 120 bp, Homo sapiens; identical to SEQ ID NO: 67095
  misc_feature: 429 for SV(C|G) and 28S

SEQ ID NO: 83507 - DNA, 120 bp, Homo sapiens; identical to SEQ ID NO: 67096
  misc_feature: 429 for SV(C|G) and 28S

SEQ ID NO: 83508 - DNA, 120 bp, Homo sapiens; identical to SEQ ID NO: 67106
  misc_feature: 428 for SV(C|G) and 28S

SEQ ID NO: 83509 - DNA, 120 bp, Homo sapiens; identical to SEQ ID NO: 67107
  misc_feature: 428 for SV(C|G) and 28S

SEQ ID NO: 83510 - DNA, 120 bp, Homo sapiens; identical to SEQ ID NO: 67114
  misc_feature: 427 for SV(C|G) and 28S

SEQ ID NO: 83511 - DNA, 120 bp, Homo sapiens; identical to SEQ ID NO: 67123
  misc_feature: 426 for SV(C|G) and 28S

SEQ ID NO: 83512 - DNA, 120 bp, Homo sapiens; identical to SEQ ID NO: 67149
  misc_feature: 424 for SV(C|G) and 28S

SEQ ID NO: 83513 - DNA, 120 bp, Homo sapiens; identical to SEQ ID NO: 67158
  misc_feature: 423 for SV(C|G) and 28S

SEQ ID NO: 83514 - DNA, 120 bp, Homo sapiens; identical to SEQ ID NO: 67159
  misc_feature: 423 for SV(C|G) and 28S

SEQ ID NO: 83515 - DNA, 120 bp, Homo sapiens; identical to SEQ ID NO: 67168
  misc_feature: 422 for SV(C|G) and 28S

SEQ ID NO: 83516 - DNA, 120 bp, Homo sapiens; identical to SEQ ID NO: 67171
  misc_feature: 421 for SV(C|G) and 28S

SEQ ID NO: 83517 - DNA, 120 bp, Homo sapiens; identical to SEQ ID NO: 67177
  misc_feature: 420 for SV(C|G) and 28S

SEQ ID NO: 83518 - DNA, 120 bp, Homo sapiens; identical to SEQ ID NO: 67192
  misc_feature: 418 for SV(C|G) and 28S

SEQ ID NO: 83519 - DNA, 120 bp, Homo sapiens; identical to SEQ ID NO: 67208
  misc_feature: 415 for SV(C|G) and 28S

SEQ ID NO: 83520 - DNA, 120 bp, Homo sapiens; identical to SEQ ID NO: 67214
  misc_feature: 413 for SV(C|G) and 28S

SEQ ID NO: 83521 - DNA, 120 bp, Homo sapiens; identical to SEQ ID NO: 67243
  misc_feature: 404 for SV(C|G) and 28S

SEQ ID NO: 83522 - DNA, 120 bp, Homo sapiens; identical to SEQ ID NO: 67246
  misc_feature: 402 for SV(C|G) and 28S

SEQ ID NO: 83523 - DNA, 120 bp, Homo sapiens; identical to SEQ ID NO: 67248
  misc_feature: 400 for SV(C|G) and 28S

SEQ ID NO: 83524 - DNA, 120 bp, Homo sapiens; identical to SEQ ID NO: 67252
  misc_feature: 398 for SV(C|G) and 28S

SEQ ID NO: 83525 - DNA, 120 bp, Homo sapiens; identical to SEQ ID NO: 67278
  misc_feature: 386 for SV(C|G) and 28S

SEQ ID NO: 83526 - DNA, 120 bp, Homo sapiens; identical to SEQ ID NO: 67283
  misc_feature: 383 for SV(C|G) and 28S

SEQ ID NO: 83527 - DNA, 120 bp, Homo sapiens; identical to SEQ ID NO: 67287
  misc_feature: 382 for SV(C|G) and 28S

SEQ ID NO: 83528 - DNA, 120 bp, Homo sapiens; identical to SEQ ID NO: 67290
  misc_feature: 377 for SV(C|G) and 28S

SEQ ID NO: 83529 - DNA, 120 bp, Homo sapiens; identical to SEQ ID NO: 67294
  misc_feature: 375 for SV(C|G) and 28S

SEQ ID NO: 83530 - DNA, 120 bp, Homo sapiens; identical to SEQ ID NO: 67296
  misc_feature: 375 for SV(C|G) and 28S

SEQ ID NO: 83531 - DNA, 120 bp, Homo sapiens; identical to SEQ ID NO: 67301
  misc_feature: 373 for SV(C|G) and 28S

SEQ ID NO: 83532 - DNA, 120 bp, Homo sapiens; identical to SEQ ID NO: 67332
  misc_feature: 365 for SV(C|G) and 28S

SEQ ID NO: 83533 - DNA, 120 bp, Homo sapiens; identical to SEQ ID NO: 67341
  misc_feature: 362 for SV(C|G) and 28S

SEQ ID NO: 83534 - DNA, 120 bp, Homo sapiens; identical to SEQ ID NO: 67343
  misc_feature: 362 for SV(C|G) and 28S

SEQ ID NO: 83535 - DNA, 120 bp, Homo sapiens; identical to SEQ ID NO: 67344
  misc_feature: 362 for SV(C|G) and 28S

SEQ ID NO: 83536 - DNA, 120 bp, Homo sapiens; identical to SEQ ID NO: 67346
  misc_feature: 361 for SV(C|G) and 28S

SEQ ID NO: 83537 - DNA, 120 bp, Homo sapiens; identical to SEQ ID NO: 67348
  misc_feature: 361 for SV(C|G) and 28S

SEQ ID NO: 83538 - DNA, 120 bp, Homo sapiens; identical to SEQ ID NO: 67354
  misc_feature: 360 for SV(C|G) and 28S

SEQ ID NO: 83539 - DNA, 120 bp, Homo sapiens; identical to SEQ ID NO: 67364
  misc_feature: 350 for SV(C|G) and 28S

SEQ ID NO: 83540 - DNA, 120 bp, Homo sapiens; identical to SEQ ID NO: 67367
  misc_feature: 348 for SV(C|G) and 28S

SEQ ID NO: 83541 - DNA, 120 bp, Homo sapiens; identical to SEQ ID NO: 67375
  misc_feature: 341 for SV(C|G) and 28S

SEQ ID NO: 83542 - DNA, 120 bp, Homo sapiens; identical to SEQ ID NO: 67376
  misc_feature: 341 for SV(C|G) and 28S

SEQ ID NO: 83543 - DNA, 120 bp, Homo sapiens; identical to SEQ ID NO: 67378
  misc_feature: 341 for SV(C|G) and 28S

SEQ ID NO: 83544 - DNA, 120 bp, Homo sapiens; identical to SEQ ID NO: 67382
  misc_feature: 339 for SV(C|G) and 28S

SEQ ID NO: 83545 - DNA, 120 bp, Homo sapiens; identical to SEQ ID NO: 67391
  misc_feature: 334 for SV(C|G) and 28S

SEQ ID NO: 83546 - DNA, 120 bp, Homo sapiens; identical to SEQ ID NO: 67396
  misc_feature: 331 for SV(C|G) and 28S

SEQ ID NO: 83547 - DNA, 120 bp, Homo sapiens; identical to SEQ ID NO: 67400
  misc_feature: 330 for SV(C|G) and 28S

SEQ ID NO: 83548 - DNA, 120 bp, Homo sapiens; identical to SEQ ID NO: 67404
  misc_feature: 329 for SV(C|G) and 28S

SEQ ID NO: 83549 - DNA, 120 bp, Homo sapiens; identical to SEQ ID NO: 67435
  misc_feature: 321 for SV(C|G) and 28S

SEQ ID NO: 83550 - DNA, 120 bp, Homo sapiens; identical to SEQ ID NO: 67442
  misc_feature: 319 for SV(C|G) and 28S

SEQ ID NO: 83551 - DNA, 120 bp, Homo sapiens; identical to SEQ ID NO: 67489
  misc_feature: 302 for SV(C|G) and 28S

SEQ ID NO: 83552 - DNA, 120 bp, Homo sapiens; identical to SEQ ID NO: 67492
  misc_feature: 302 for SV(C|G) and 28S

SEQ ID NO: 83553 - DNA, 120 bp, Homo sapiens; identical to SEQ ID NO: 51324
  misc_feature: 285 for SV(C|G) and 28S

SEQ ID NO: 83554 - DNA, 120 bp, Homo sapiens; identical to SEQ ID NO: 51301
  misc_feature: 283 for SV(C|G) and 28S

SEQ ID NO: 83555 - DNA, 120 bp, Homo sapiens; identical to SEQ ID NO: 51677
  misc_feature: 282 for SV(C|G) and 28S

SEQ ID NO: 83556 - DNA, 120 bp, Homo sapiens; identical to SEQ ID NO: 51300
  misc_feature: 279 for SV(C|G) and 28S

SEQ ID NO: 83557 - DNA, 120 bp, Homo sapiens; identical to SEQ ID NO: 83073
  misc_feature: 279 for SV(C|G) and 28S

SEQ ID NO: 83558 - DNA, 120 bp, Homo sapiens
  misc_feature: 275 for SV(C|G) and 28S
gccgccgccccgacccgcgcgccctcccgagggaggacgcggggccggggggcggagacgggggaggaggaggacggacggacggacggacggggccccccgagccaccttccccgccgg

SEQ ID NO: 83559 - DNA, 120 bp, Homo sapiens
  misc_feature: 274 for SV(C|G) and 28S
cgccgccgccccgacccgcgcgccctcccgagggaggacgcggggccggggggcggagacgggggaggaggaggacggacggacggacggacggggccccccgagccaccttccccgccg

SEQ ID NO: 83560 - DNA, 120 bp, Homo sapiens; identical to SEQ ID NO: 51331
  misc_feature: 272 for SV(C|G) and 28S

SEQ ID NO: 83561 - DNA, 120 bp, Homo sapiens
  misc_feature: 267 for SV(C|G) and 28S
ggtcgcggcgcaccgccgcggtggaaatgcgcccggcggcggccggtcgccggtcgggggacggtcccccgccgaccccacccccggccccgcccgcccacccccgcacccgccggagcc

SEQ ID NO: 83562 - DNA, 120 bp, Homo sapiens
  misc_feature: 267 for SV(C|G) and 28S
ggaatcccccgcgaggggggtctcccccgcgggggcgcgccggcgtctcctcgtgggggggccgggccacccctcccacggcgcgaccgctctcccacccctcctccccgcgcccccgcc

SEQ ID NO: 83563 - DNA, 120 bp, Homo sapiens
  misc_feature: 266 for SV(C|G) and 28S
gggaatcccccgcgaggggggtctcccccgcgggggcgcgccggcgtctcctcgtgggggggccgggccacccctcccacggcgcgaccgctctcccacccctcctccccgcgcccccgc

SEQ ID NO: 83564 - DNA, 120 bp, Homo sapiens; identical to SEQ ID NO: 51461
  misc_feature: 265 for SV(C|G) and 28S

SEQ ID NO: 83565 - DNA, 120 bp, Homo sapiens
  misc_feature: 265 for SV(C|G) and 28S
gtcgcggcgcaccgccgcggtggaaatgcgcccggcggcggccggtcgccggtcgggggacggtcccccgccgaccccacccccggccccgcccgcccacccccgcacccgccggagccc

SEQ ID NO: 83566 - DNA, 120 bp, Homo sapiens
  misc_feature: 264 for SV(C|G) and 28S
aatcccccgcgaggggggtctcccccgcgggggcgcgccggcgtctcctcgtgggggggccgggccacccctcccacggcgcgaccgctctcccacccctcctccccgcgcccccgcccc

SEQ ID NO: 83567 - DNA, 120 bp, Homo sapiens
  misc_feature: 264 for SV(C|G) and 28S
gaatcccccgcgaggggggtctcccccgcgggggcgcgccggcgtctcctcgtgggggggccgggccacccctcccacggcgcgaccgctctcccacccctcctccccgcgcccccgccc

SEQ ID NO: 83568 - DNA, 120 bp, Homo sapiens; identical to SEQ ID NO: 51484
  misc_feature: 261 for SV(C|G) and 28S

SEQ ID NO: 83569 - DNA, 120 bp, Homo sapiens
  misc_feature: 260 for SV(C|G) and 28S
gagccggtcgcggcgcaccgccgcggtggaaatgcgcccggcggcggccggtcgccggtcgggggacggtcccccgccgaccccacccccggccccgcccgcccacccccgcacccgccg

SEQ ID NO: 83570 - DNA, 120 bp, Homo sapiens; identical to SEQ ID NO: 51398
  misc_feature: 260 for SV(C|G) and 28S

SEQ ID NO: 83571 - DNA, 120 bp, Homo sapiens
  misc_feature: 258 for SV(C|G) and 28S
agccggtcgcggcgcaccgccgcggtggaaatgcgcccggcggcggccggtcgccggtcgggggacggtcccccgccgaccccacccccggccccgcccgcccacccccgcacccgccgg

SEQ ID NO: 83572 - DNA, 120 bp, Homo sapiens
  misc_feature: 256 for SV(C|G) and 28S
cggtcgcggcgcaccgccgcggtggaaatgcgcccggcggcggccggtcgccggtcgggggacggtcccccgccgaccccacccccggccccgcccgcccacccccgcacccgccggagc

SEQ ID NO: 83573 - DNA, 120 bp, Homo sapiens
  misc_feature: 256 for SV(C|G) and 28S
gccgggccttcccagccgtcccggagccggtcgcggcgcaccgccgcggtggaaatgcgcccggcggcggccggtcgccggtcgggggacggtcccccgccgaccccacccccggccccg

SEQ ID NO: 83574 - DNA, 120 bp, Homo sapiens
  misc_feature: 255 for SV(C|G) and 28S
ggagccggtcgcggcgcaccgccgcggtggaaatgcgcccggcggcggccggtcgccggtcgggggacggtcccccgccgaccccacccccggccccgcccgcccacccccgcacccgcc

SEQ ID NO: 83575 - DNA, 120 bp, Homo sapiens
  misc_feature: 254 for SV(C|G) and 28S
ccggtcgcggcgcaccgccgcggtggaaatgcgcccggcggcggccggtcgccggtcgggggacggtcccccgccgaccccacccccggccccgcccgcccacccccgcacccgccggag

SEQ ID NO: 83576 - DNA, 120 bp, Homo sapiens
  misc_feature: 253 for SV(C|G) and 28S
gccggtcgcggcgcaccgccgcggtggaaatgcgcccggcggcggccggtcgccggtcgggggacggtcccccgccgaccccacccccggccccgcccgcccacccccgcacccgccgga

SEQ ID NO: 83577 - DNA, 120 bp, Homo sapiens
  misc_feature: 253 for SV(C|G) and 28S
cgggccttcccagccgtcccggagccggtcgcggcgcaccgccgcggtggaaatgcgcccggcggcggccggtcgccggtcgggggacggtcccccgccgaccccacccccggccccgcc

SEQ ID NO: 83578 - DNA, 120 bp, Homo sapiens
  misc_feature: 253 for SV(C|G) and 28S
ggacggacggacggggccccccgagccaccttccccgccgggccttcccagccgtcccggagccggtcgcggcgcaccgccgcggtggaaatgcgcccggcggcggccggtcgccggtcg

SEQ ID NO: 83579 - DNA, 120 bp, Homo sapiens
  misc_feature: 252 for SV(C|G) and 28S
ccgggccttcccagccgtcccggagccggtcgcggcgcaccgccgcggtggaaatgcgcccggcggcggccggtcgccggtcgggggacggtcccccgccgaccccacccccggccccgc

SEQ ID NO: 83580 - DNA, 120 bp, Homo sapiens
  misc_feature: 250 for SV(C|G) and 28S
gggccccccgagccaccttccccgccgggccttcccagccgtcccggagccggtcgcggcgcaccgccgcggtggaaatgcgcccggcggcggccggtcgccggtcgggggacggtcccc

SEQ ID NO: 83581 - DNA, 120 bp, Homo sapiens; identical to SEQ ID NO: 68032
  misc_feature: 871 for SV(C|G) and mtDNA

SEQ ID NO: 83582 - DNA, 120 bp, Homo sapiens; identical to SEQ ID NO: 68033
  misc_feature: 871 for SV(C|G) and mtDNA

SEQ ID NO: 83583 - DNA, 120 bp, Homo sapiens; identical to SEQ ID NO: 68072
  misc_feature: 865 for SV(C|G) and mtDNA

SEQ ID NO: 83584 - DNA, 120 bp, Homo sapiens; identical to SEQ ID NO: 68111
  misc_feature: 861 for SV(C|G) and mtDNA

SEQ ID NO: 83585 - DNA, 120 bp, Homo sapiens; identical to SEQ ID NO: 68209
  misc_feature: 854 for SV(C|G) and mtDNA

SEQ ID NO: 83586 - DNA, 120 bp, Homo sapiens; identical to SEQ ID NO: 68511
  misc_feature: 834 for SV(C|G) and mtDNA

SEQ ID NO: 83587 - DNA, 120 bp, Homo sapiens; identical to SEQ ID NO: 68615
  misc_feature: 827 for SV(C|G) and mtDNA

SEQ ID NO: 83588 - DNA, 120 bp, Homo sapiens; identical to SEQ ID NO: 68682
  misc_feature: 823 for SV(C|G) and mtDNA

SEQ ID NO: 83589 - DNA, 120 bp, Homo sapiens; identical to SEQ ID NO: 68724
  misc_feature: 820 for SV(C|G) and mtDNA

SEQ ID NO: 83590 - DNA, 120 bp, Homo sapiens; identical to SEQ ID NO: 68837
  misc_feature: 811 for SV(C|G) and mtDNA

SEQ ID NO: 83591 - DNA, 120 bp, Homo sapiens; identical to SEQ ID NO: 68878
  misc_feature: 809 for SV(C|G) and mtDNA

SEQ ID NO: 83592 - DNA, 120 bp, Homo sapiens; identical to SEQ ID NO: 68881
  misc_feature: 809 for SV(C|G) and mtDNA

SEQ ID NO: 83593 - DNA, 120 bp, Homo sapiens; identical to SEQ ID NO: 68886
  misc_feature: 809 for SV(C|G) and mtDNA

SEQ ID NO: 83594 - DNA, 120 bp, Homo sapiens; identical to SEQ ID NO: 68912
  misc_feature: 807 for SV(C|G) and mtDNA

SEQ ID NO: 83595 - DNA, 120 bp, Homo sapiens; identical to SEQ ID NO: 68924
  misc_feature: 807 for SV(C|G) and mtDNA

SEQ ID NO: 83596 - DNA, 120 bp, Homo sapiens; identical to SEQ ID NO: 68930
  misc_feature: 806 for SV(C|G) and mtDNA

SEQ ID NO: 83597 - DNA, 120 bp, Homo sapiens; identical to SEQ ID NO: 68935
  misc_feature: 806 for SV(C|G) and mtDNA

SEQ ID NO: 83598 - DNA, 120 bp, Homo sapiens; identical to SEQ ID NO: 68946
  misc_feature: 805 for SV(C|G) and mtDNA

SEQ ID NO: 83599 - DNA, 120 bp, Homo sapiens; identical to SEQ ID NO: 68952
  misc_feature: 805 for SV(C|G) and mtDNA

SEQ ID NO: 83600 - DNA, 120 bp, Homo sapiens; identical to SEQ ID NO: 68968
  misc_feature: 804 for SV(C|G) and mtDNA

SEQ ID NO: 83601 - DNA, 120 bp, Homo sapiens; identical to SEQ ID NO: 68997
  misc_feature: 802 for SV(C|G) and mtDNA

SEQ ID NO: 83602 - DNA, 120 bp, Homo sapiens; identical to SEQ ID NO: 69020
  misc_feature: 801 for SV(C|G) and mtDNA

SEQ ID NO: 83603 - DNA, 120 bp, Homo sapiens; identical to SEQ ID NO: 69058
  misc_feature: 799 for SV(C|G) and mtDNA

SEQ ID NO: 83604 - DNA, 120 bp, Homo sapiens; identical to SEQ ID NO: 52541
  misc_feature: 797 for SV(C|G) and mtDNA

SEQ ID NO: 83605 - DNA, 120 bp, Homo sapiens; identical to SEQ ID NO: 69122
  misc_feature: 796 for SV(C|G) and mtDNA

SEQ ID NO: 83606 - DNA, 120 bp, Homo sapiens; identical to SEQ ID NO: 69173
  misc_feature: 794 for SV(C|G) and mtDNA

SEQ ID NO: 83607 - DNA, 120 bp, Homo sapiens; identical to SEQ ID NO: 69180
  misc_feature: 793 for SV(C|G) and mtDNA

SEQ ID NO: 83608 - DNA, 120 bp, Homo sapiens; identical to SEQ ID NO: 52534
  misc_feature: 792 for SV(C|G) and mtDNA

SEQ ID NO: 83609 - DNA, 120 bp, Homo sapiens; identical to SEQ ID NO: 52608
  misc_feature: 791 for SV(C|G) and mtDNA

SEQ ID NO: 83610 - DNA, 120 bp, Homo sapiens; identical to SEQ ID NO: 69389
  misc_feature: 784 for SV(C|G) and mtDNA

SEQ ID NO: 83611 - DNA, 120 bp, Homo sapiens; identical to SEQ ID NO: 52367
  misc_feature: 782 for SV(C|G) and mtDNA

SEQ ID NO: 83612 - DNA, 120 bp, Homo sapiens; identical to SEQ ID NO: 69448
  misc_feature: 782 for SV(C|G) and mtDNA

SEQ ID NO: 83613 - DNA, 120 bp, Homo sapiens; identical to SEQ ID NO: 69493
  misc_feature: 780 for SV(C|G) and mtDNA

SEQ ID NO: 83614 - DNA, 120 bp, Homo sapiens; identical to SEQ ID NO: 69518
  misc_feature: 779 for SV(C|G) and mtDNA

SEQ ID NO: 83615 - DNA, 120 bp, Homo sapiens; identical to SEQ ID NO: 69584
  misc_feature: 776 for SV(C|G) and mtDNA

SEQ ID NO: 83616 - DNA, 120 bp, Homo sapiens; identical to SEQ ID NO: 69595
  misc_feature: 776 for SV(C|G) and mtDNA

SEQ ID NO: 83617 - DNA, 120 bp, Homo sapiens; identical to SEQ ID NO: 52401
  misc_feature: 775 for SV(C|G) and mtDNA

SEQ ID NO: 83618 - DNA, 120 bp, Homo sapiens; identical to SEQ ID NO: 52263
  misc_feature: 774 for SV(C|G) and mtDNA

SEQ ID NO: 83619 - DNA, 120 bp, Homo sapiens; identical to SEQ ID NO: 69727
  misc_feature: 772 for SV(C|G) and mtDNA

SEQ ID NO: 83620 - DNA, 120 bp, Homo sapiens; identical to SEQ ID NO: 69738
  misc_feature: 771 for SV(C|G) and mtDNA

SEQ ID NO: 83621 - DNA, 120 bp, Homo sapiens; identical to SEQ ID NO: 69808
  misc_feature: 769 for SV(C|G) and mtDNA

SEQ ID NO: 83622 - DNA, 120 bp, Homo sapiens; identical to SEQ ID NO: 69810
  misc_feature: 769 for SV(C|G) and mtDNA

SEQ ID NO: 83623 - DNA, 120 bp, Homo sapiens; identical to SEQ ID NO: 69848
  misc_feature: 768 for SV(C|G) and mtDNA

SEQ ID NO: 83624 - DNA, 120 bp, Homo sapiens; identical to SEQ ID NO: 69852
  misc_feature: 767 for SV(C|G) and mtDNA

SEQ ID NO: 83625 - DNA, 120 bp, Homo sapiens; identical to SEQ ID NO: 52340
  misc_feature: 767 for SV(C|G) and mtDNA

SEQ ID NO: 83626 - DNA, 120 bp, Homo sapiens; identical to SEQ ID NO: 69893
  misc_feature: 766 for SV(C|G) and mtDNA

SEQ ID NO: 83627 - DNA, 120 bp, Homo sapiens; identical to SEQ ID NO: 69907
  misc_feature: 766 for SV(C|G) and mtDNA

SEQ ID NO: 83628 - DNA, 120 bp, Homo sapiens; identical to SEQ ID NO: 69918
  misc_feature: 765 for SV(C|G) and mtDNA

SEQ ID NO: 83629 - DNA, 120 bp, Homo sapiens; identical to SEQ ID NO: 69921
  misc_feature: 765 for SV(C|G) and mtDNA

SEQ ID NO: 83630 - DNA, 120 bp, Homo sapiens; identical to SEQ ID NO: 69939
  misc_feature: 765 for SV(C|G) and mtDNA

SEQ ID NO: 83631 - DNA, 120 bp, Homo sapiens; identical to SEQ ID NO: 69955
  misc_feature: 764 for SV(C|G) and mtDNA

SEQ ID NO: 83632 - DNA, 120 bp, Homo sapiens; identical to SEQ ID NO: 69980
  misc_feature: 764 for SV(C|G) and mtDNA

SEQ ID NO: 83633 - DNA, 120 bp, Homo sapiens; identical to SEQ ID NO: 70049
  misc_feature: 761 for SV(C|G) and mtDNA

SEQ ID NO: 83634 - DNA, 120 bp, Homo sapiens; identical to SEQ ID NO: 70050
  misc_feature: 761 for SV(C|G) and mtDNA

SEQ ID NO: 83635 - DNA, 120 bp, Homo sapiens; identical to SEQ ID NO: 70053
  misc_feature: 761 for SV(C|G) and mtDNA

SEQ ID NO: 83636 - DNA, 120 bp, Homo sapiens; identical to SEQ ID NO: 70069
  misc_feature: 761 for SV(C|G) and mtDNA

SEQ ID NO: 83637 - DNA, 120 bp, Homo sapiens; identical to SEQ ID NO: 70100
  misc_feature: 760 for SV(C|G) and mtDNA

SEQ ID NO: 83638 - DNA, 120 bp, Homo sapiens; identical to SEQ ID NO: 70110
  misc_feature: 760 for SV(C|G) and mtDNA

SEQ ID NO: 83639 - DNA, 120 bp, Homo sapiens; identical to SEQ ID NO: 70160
  misc_feature: 758 for SV(C|G) and mtDNA

SEQ ID NO: 83640 - DNA, 120 bp, Homo sapiens; identical to SEQ ID NO: 70185
  misc_feature: 758 for SV(C|G) and mtDNA

SEQ ID NO: 83641 - DNA, 120 bp, Homo sapiens; identical to SEQ ID NO: 51691
  misc_feature: 757 for SV(C|G) and mtDNA

SEQ ID NO: 83642 - DNA, 120 bp, Homo sapiens; identical to SEQ ID NO: 70251
  misc_feature: 756 for SV(C|G) and mtDNA

SEQ ID NO: 83643 - DNA, 120 bp, Homo sapiens; identical to SEQ ID NO: 70266
  misc_feature: 756 for SV(C|G) and mtDNA

SEQ ID NO: 83644 - DNA, 120 bp, Homo sapiens; identical to SEQ ID NO: 70267
  misc_feature: 756 for SV(C|G) and mtDNA

SEQ ID NO: 83645 - DNA, 120 bp, Homo sapiens; identical to SEQ ID NO: 70271
  misc_feature: 756 for SV(C|G) and mtDNA

SEQ ID NO: 83646 - DNA, 120 bp, Homo sapiens; identical to SEQ ID NO: 70281
  misc_feature: 756 for SV(C|G) and mtDNA

SEQ ID NO: 83647 - DNA, 120 bp, Homo sapiens; identical to SEQ ID NO: 70360
  misc_feature: 754 for SV(C|G) and mtDNA

SEQ ID NO: 83648 - DNA, 120 bp, Homo sapiens; identical to SEQ ID NO: 70368
  misc_feature: 753 for SV(C|G) and mtDNA

SEQ ID NO: 83649 - DNA, 120 bp, Homo sapiens; identical to SEQ ID NO: 70382
  misc_feature: 753 for SV(C|G) and mtDNA

SEQ ID NO: 83650 - DNA, 120 bp, Homo sapiens; identical to SEQ ID NO: 70405
  misc_feature: 752 for SV(C|G) and mtDNA

SEQ ID NO: 83651 - DNA, 120 bp, Homo sapiens; identical to SEQ ID NO: 70439
  misc_feature: 751 for SV(C|G) and mtDNA

SEQ ID NO: 83652 - DNA, 120 bp, Homo sapiens; identical to SEQ ID NO: 70452
  misc_feature: 751 for SV(C|G) and mtDNA

SEQ ID NO: 83653 - DNA, 120 bp, Homo sapiens; identical to SEQ ID NO: 70473
  misc_feature: 750 for SV(C|G) and mtDNA

SEQ ID NO: 83654 - DNA, 120 bp, Homo sapiens; identical to SEQ ID NO: 70476
  misc_feature: 750 for SV(C|G) and mtDNA

SEQ ID NO: 83655 - DNA, 120 bp, Homo sapiens; identical to SEQ ID NO: 70492
  misc_feature: 750 for SV(C|G) and mtDNA

SEQ ID NO: 83656 - DNA, 120 bp, Homo sapiens; identical to SEQ ID NO: 70496
  misc_feature: 750 for SV(C|G) and mtDNA

SEQ ID NO: 83657 - DNA, 120 bp, Homo sapiens; identical to SEQ ID NO: 70523
  misc_feature: 749 for SV(C|G) and mtDNA

SEQ ID NO: 83658 - DNA, 120 bp, Homo sapiens; identical to SEQ ID NO: 70529
  misc_feature: 749 for SV(C|G) and mtDNA

SEQ ID NO: 83659 - DNA, 120 bp, Homo sapiens; identical to SEQ ID NO: 70596
  misc_feature: 747 for SV(C|G) and mtDNA

SEQ ID NO: 83660 - DNA, 120 bp, Homo sapiens; identical to SEQ ID NO: 70617
  misc_feature: 746 for SV(C|G) and mtDNA

SEQ ID NO: 83661 - DNA, 120 bp, Homo sapiens; identical to SEQ ID NO: 70619
  misc_feature: 746 for SV(C|G) and mtDNA

SEQ ID NO: 83662 - DNA, 120 bp, Homo sapiens; identical to SEQ ID NO: 70639
  misc_feature: 746 for SV(C|G) and mtDNA

SEQ ID NO: 83663 - DNA, 120 bp, Homo sapiens; identical to SEQ ID NO: 70644
  misc_feature: 746 for SV(C|G) and mtDNA

SEQ ID NO: 83664 - DNA, 120 bp, Homo sapiens; identical to SEQ ID NO: 70647
  misc_feature: 746 for SV(C|G) and mtDNA

SEQ ID NO: 83665 - DNA, 120 bp, Homo sapiens; identical to SEQ ID NO: 70670
  misc_feature: 745 for SV(C|G) and mtDNA

SEQ ID NO: 83666 - DNA, 120 bp, Homo sapiens; identical to SEQ ID NO: 70673
  misc_feature: 745 for SV(C|G) and mtDNA

SEQ ID NO: 83667 - DNA, 120 bp, Homo sapiens; identical to SEQ ID NO: 70674
  misc_feature: 745 for SV(C|G) and mtDNA

SEQ ID NO: 83668 - DNA, 120 bp, Homo sapiens; identical to SEQ ID NO: 70693
  misc_feature: 745 for SV(C|G) and mtDNA

SEQ ID NO: 83669 - DNA, 120 bp, Homo sapiens; identical to SEQ ID NO: 70694
  misc_feature: 745 for SV(C|G) and mtDNA

SEQ ID NO: 83670 - DNA, 120 bp, Homo sapiens; identical to SEQ ID NO: 70774
  misc_feature: 743 for SV(C|G) and mtDNA

SEQ ID NO: 83671 - DNA, 120 bp, Homo sapiens; identical to SEQ ID NO: 70775
  misc_feature: 743 for SV(C|G) and mtDNA

SEQ ID NO: 83672 - DNA, 120 bp, Homo sapiens; identical to SEQ ID NO: 70786
  misc_feature: 743 for SV(C|G) and mtDNA

SEQ ID NO: 83673 - DNA, 120 bp, Homo sapiens; identical to SEQ ID NO: 70788
  misc_feature: 743 for SV(C|G) and mtDNA

SEQ ID NO: 83674 - DNA, 120 bp, Homo sapiens; identical to SEQ ID NO: 51693
  misc_feature: 742 for SV(C|G) and mtDNA

SEQ ID NO: 83675 - DNA, 120 bp, Homo sapiens; identical to SEQ ID NO: 51690
  misc_feature: 742 for SV(C|G) and mtDNA

SEQ ID NO: 83676 - DNA, 120 bp, Homo sapiens; identical to SEQ ID NO: 70850
  misc_feature: 741 for SV(C|G) and mtDNA

SEQ ID NO: 83677 - DNA, 120 bp, Homo sapiens; identical to SEQ ID NO: 70885
  misc_feature: 740 for SV(C|G) and mtDNA

SEQ ID NO: 83678 - DNA, 120 bp, Homo sapiens; identical to SEQ ID NO: 70886
  misc_feature: 740 for SV(C|G) and mtDNA

SEQ ID NO: 83679 - DNA, 120 bp, Homo sapiens; identical to SEQ ID NO: 70891
  misc_feature: 740 for SV(C|G) and mtDNA

SEQ ID NO: 83680 - DNA, 120 bp, Homo sapiens; identical to SEQ ID NO: 70987
  misc_feature: 738 for SV(C|G) and mtDNA

SEQ ID NO: 83681 - DNA, 120 bp, Homo sapiens; identical to SEQ ID NO: 71014
  misc_feature: 737 for SV(C|G) and mtDNA

SEQ ID NO: 83682 - DNA, 120 bp, Homo sapiens; identical to SEQ ID NO: 71023
  misc_feature: 736 for SV(C|G) and mtDNA

SEQ ID NO: 83683 - DNA, 120 bp, Homo sapiens; identical to SEQ ID NO: 71066
  misc_feature: 735 for SV(C|G) and mtDNA

SEQ ID NO: 83684 - DNA, 120 bp, Homo sapiens; identical to SEQ ID NO: 71083
  misc_feature: 735 for SV(C|G) and mtDNA

SEQ ID NO: 83685 - DNA, 120 bp, Homo sapiens; identical to SEQ ID NO: 71182
  misc_feature: 733 for SV(C|G) and mtDNA

SEQ ID NO: 83686 - DNA, 120 bp, Homo sapiens; identical to SEQ ID NO: 71237
  misc_feature: 731 for SV(C|G) and mtDNA

SEQ ID NO: 83687 - DNA, 120 bp, Homo sapiens; identical to SEQ ID NO: 71300
  misc_feature: 730 for SV(C|G) and mtDNA

SEQ ID NO: 83688 - DNA, 120 bp, Homo sapiens; identical to SEQ ID NO: 71323
  misc_feature: 729 for SV(C|G) and mtDNA

SEQ ID NO: 83689 - DNA, 120 bp, Homo sapiens; identical to SEQ ID NO: 71324
  misc_feature: 729 for SV(C|G) and mtDNA

SEQ ID NO: 83690 - DNA, 120 bp, Homo sapiens; identical to SEQ ID NO: 71332
  misc_feature: 729 for SV(C|G) and mtDNA

SEQ ID NO: 83691 - DNA, 120 bp, Homo sapiens; identical to SEQ ID NO: 71354
  misc_feature: 729 for SV(C|G) and mtDNA

SEQ ID NO: 83692 - DNA, 120 bp, Homo sapiens; identical to SEQ ID NO: 71368
  misc_feature: 728 for SV(C|G) and mtDNA

SEQ ID NO: 83693 - DNA, 120 bp, Homo sapiens; identical to SEQ ID NO: 71428
  misc_feature: 726 for SV(C|G) and mtDNA

SEQ ID NO: 83694 - DNA, 120 bp, Homo sapiens; identical to SEQ ID NO: 71463
  misc_feature: 726 for SV(C|G) and mtDNA

SEQ ID NO: 83695 - DNA, 120 bp, Homo sapiens; identical to SEQ ID NO: 71522
  misc_feature: 724 for SV(C|G) and mtDNA

SEQ ID NO: 83696 - DNA, 120 bp, Homo sapiens; identical to SEQ ID NO: 71624
  misc_feature: 722 for SV(C|G) and mtDNA

SEQ ID NO: 83697 - DNA, 120 bp, Homo sapiens; identical to SEQ ID NO: 71647
  misc_feature: 721 for SV(C|G) and mtDNA

SEQ ID NO: 83698 - DNA, 120 bp, Homo sapiens; identical to SEQ ID NO: 71656
  misc_feature: 721 for SV(C|G) and mtDNA

SEQ ID NO: 83699 - DNA, 120 bp, Homo sapiens; identical to SEQ ID NO: 71693
  misc_feature: 720 for SV(C|G) and mtDNA

SEQ ID NO: 83700 - DNA, 120 bp, Homo sapiens; identical to SEQ ID NO: 71713
  misc_feature: 720 for SV(C|G) and mtDNA

SEQ ID NO: 83701 - DNA, 120 bp, Homo sapiens; identical to SEQ ID NO: 71757
  misc_feature: 719 for SV(C|G) and mtDNA

SEQ ID NO: 83702 - DNA, 120 bp, Homo sapiens; identical to SEQ ID NO: 71769
  misc_feature: 718 for SV(C|G) and mtDNA

SEQ ID NO: 83703 - DNA, 120 bp, Homo sapiens; identical to SEQ ID NO: 71806
  misc_feature: 717 for SV(C|G) and mtDNA

SEQ ID NO: 83704 - DNA, 120 bp, Homo sapiens; identical to SEQ ID NO: 71870
  misc_feature: 716 for SV(C|G) and mtDNA

SEQ ID NO: 83705 - DNA, 120 bp, Homo sapiens; identical to SEQ ID NO: 71894
  misc_feature: 716 for SV(C|G) and mtDNA

SEQ ID NO: 83706 - DNA, 120 bp, Homo sapiens; identical to SEQ ID NO: 71900
  misc_feature: 716 for SV(C|G) and mtDNA

SEQ ID NO: 83707 - DNA, 120 bp, Homo sapiens; identical to SEQ ID NO: 71921
  misc_feature: 715 for SV(C|G) and mtDNA

SEQ ID NO: 83708 - DNA, 120 bp, Homo sapiens; identical to SEQ ID NO: 72152
  misc_feature: 709 for SV(C|G) and mtDNA

SEQ ID NO: 83709 - DNA, 120 bp, Homo sapiens; identical to SEQ ID NO: 72261
  misc_feature: 707 for SV(C|G) and mtDNA

SEQ ID NO: 83710 - DNA, 120 bp, Homo sapiens; identical to SEQ ID NO: 55131
  misc_feature: 704 for SV(C|G) and mtDNA

SEQ ID NO: 83711 - DNA, 120 bp, Homo sapiens; identical to SEQ ID NO: 55484
  misc_feature: 703 for SV(C|G) and mtDNA

SEQ ID NO: 83712 - DNA, 120 bp, Homo sapiens; identical to SEQ ID NO: 55944
  misc_feature: 702 for SV(C|G) and mtDNA

SEQ ID NO: 83713 - DNA, 120 bp, Homo sapiens; identical to SEQ ID NO: 72530
  misc_feature: 702 for SV(C|G) and mtDNA

SEQ ID NO: 83714 - DNA, 120 bp, Homo sapiens; identical to SEQ ID NO: 72551
  misc_feature: 701 for SV(C|G) and mtDNA

SEQ ID NO: 83715 - DNA, 120 bp, Homo sapiens; identical to SEQ ID NO: 72580
  misc_feature: 700 for SV(C|G) and mtDNA

SEQ ID NO: 83716 - DNA, 120 bp, Homo sapiens; identical to SEQ ID NO: 72630
  misc_feature: 699 for SV(C|G) and mtDNA

SEQ ID NO: 83717 - DNA, 120 bp, Homo sapiens; identical to SEQ ID NO: 72690
  misc_feature: 698 for SV(C|G) and mtDNA

SEQ ID NO: 83718 - DNA, 120 bp, Homo sapiens; identical to SEQ ID NO: 55702
  misc_feature: 697 for SV(C|G) and mtDNA

SEQ ID NO: 83719 - DNA, 120 bp, Homo sapiens; identical to SEQ ID NO: 72757
  misc_feature: 697 for SV(C|G) and mtDNA

SEQ ID NO: 83720 - DNA, 120 bp, Homo sapiens; identical to SEQ ID NO: 72780
  misc_feature: 696 for SV(C|G) and mtDNA

SEQ ID NO: 83721 - DNA, 120 bp, Homo sapiens; identical to SEQ ID NO: 72804
  misc_feature: 695 for SV(C|G) and mtDNA

SEQ ID NO: 83722 - DNA, 120 bp, Homo sapiens; identical to SEQ ID NO: 72811
  misc_feature: 695 for SV(C|G) and mtDNA

SEQ ID NO: 83723 - DNA, 120 bp, Homo sapiens; identical to SEQ ID NO: 72827
  misc_feature: 695 for SV(C|G) and mtDNA

SEQ ID NO: 83724 - DNA, 120 bp, Homo sapiens; identical to SEQ ID NO: 72844
  misc_feature: 694 for SV(C|G) and mtDNA

SEQ ID NO: 83725 - DNA, 120 bp, Homo sapiens; identical to SEQ ID NO: 72859
  misc_feature: 694 for SV(C|G) and mtDNA

SEQ ID NO: 83726 - DNA, 120 bp, Homo sapiens; identical to SEQ ID NO: 55795
  misc_feature: 693 for SV(C|G) and mtDNA

SEQ ID NO: 83727 - DNA, 120 bp, Homo sapiens; identical to SEQ ID NO: 73022
  misc_feature: 691 for SV(C|G) and mtDNA

SEQ ID NO: 83728 - DNA, 120 bp, Homo sapiens; identical to SEQ ID NO: 55564
  misc_feature: 690 for SV(C|G) and mtDNA

SEQ ID NO: 83729 - DNA, 120 bp, Homo sapiens; identical to SEQ ID NO: 73093
  misc_feature: 689 for SV(C|G) and mtDNA

SEQ ID NO: 83730 - DNA, 120 bp, Homo sapiens; identical to SEQ ID NO: 73123
  misc_feature: 688 for SV(C|G) and mtDNA

SEQ ID NO: 83731 - DNA, 120 bp, Homo sapiens; identical to SEQ ID NO: 55534
  misc_feature: 688 for SV(C|G) and mtDNA

SEQ ID NO: 83732 - DNA, 120 bp, Homo sapiens; identical to SEQ ID NO: 73267
  misc_feature: 685 for SV(C|G) and mtDNA

SEQ ID NO: 83733 - DNA, 120 bp, Homo sapiens; identical to SEQ ID NO: 73282
  misc_feature: 685 for SV(C|G) and mtDNA

SEQ ID NO: 83734 - DNA, 120 bp, Homo sapiens; identical to SEQ ID NO: 73284
  misc_feature: 685 for SV(C|G) and mtDNA

SEQ ID NO: 83735 - DNA, 120 bp, Homo sapiens; identical to SEQ ID NO: 73314
  misc_feature: 684 for SV(C|G) and mtDNA

SEQ ID NO: 83736 - DNA, 120 bp, Homo sapiens; identical to SEQ ID NO: 55653
  misc_feature: 683 for SV(C|G) and mtDNA

SEQ ID NO: 83737 - DNA, 120 bp, Homo sapiens; identical to SEQ ID NO: 73396
  misc_feature: 683 for SV(C|G) and mtDNA

SEQ ID NO: 83738 - DNA, 120 bp, Homo sapiens; identical to SEQ ID NO: 54832
  misc_feature: 682 for SV(C|G) and mtDNA

SEQ ID NO: 83739 - DNA, 120 bp, Homo sapiens; identical to SEQ ID NO: 73425
  misc_feature: 682 for SV(C|G) and mtDNA

SEQ ID NO: 83740 - DNA, 120 bp, Homo sapiens; identical to SEQ ID NO: 73461
  misc_feature: 681 for SV(C|G) and mtDNA

SEQ ID NO: 83741 - DNA, 120 bp, Homo sapiens; identical to SEQ ID NO: 73529
  misc_feature: 680 for SV(C|G) and mtDNA

SEQ ID NO: 83742 - DNA, 120 bp, Homo sapiens; identical to SEQ ID NO: 73561
  misc_feature: 680 for SV(C|G) and mtDNA

SEQ ID NO: 83743 - DNA, 120 bp, Homo sapiens; identical to SEQ ID NO: 73612
  misc_feature: 679 for SV(C|G) and mtDNA

SEQ ID NO: 83744 - DNA, 120 bp, Homo sapiens; identical to SEQ ID NO: 56055
  misc_feature: 678 for SV(C|G) and mtDNA

SEQ ID NO: 83745 - DNA, 120 bp, Homo sapiens; identical to SEQ ID NO: 73713
  misc_feature: 677 for SV(C|G) and mtDNA

SEQ ID NO: 83746 - DNA, 120 bp, Homo sapiens; identical to SEQ ID NO: 73726
  misc_feature: 676 for SV(C|G) and mtDNA

SEQ ID NO: 83747 - DNA, 120 bp, Homo sapiens; identical to SEQ ID NO: 73780
  misc_feature: 675 for SV(C|G) and mtDNA

SEQ ID NO: 83748 - DNA, 120 bp, Homo sapiens; identical to SEQ ID NO: 56337
  misc_feature: 674 for SV(C|G) and mtDNA

SEQ ID NO: 83749 - DNA, 120 bp, Homo sapiens; identical to SEQ ID NO: 73894
  misc_feature: 673 for SV(C|G) and mtDNA

SEQ ID NO: 83750 - DNA, 120 bp, Homo sapiens; identical to SEQ ID NO: 73994
  misc_feature: 671 for SV(C|G) and mtDNA

SEQ ID NO: 83751 - DNA, 120 bp, Homo sapiens; identical to SEQ ID NO: 55009
  misc_feature: 671 for SV(C|G) and mtDNA

SEQ ID NO: 83752 - DNA, 120 bp, Homo sapiens; identical to SEQ ID NO: 74009
  misc_feature: 671 for SV(C|G) and mtDNA

SEQ ID NO: 83753 - DNA, 120 bp, Homo sapiens; identical to SEQ ID NO: 55316
  misc_feature: 670 for SV(C|G) and mtDNA

SEQ ID NO: 83754 - DNA, 120 bp, Homo sapiens; identical to SEQ ID NO: 74074
  misc_feature: 669 for SV(C|G) and mtDNA

SEQ ID NO: 83755 - DNA, 120 bp, Homo sapiens; identical to SEQ ID NO: 74080
  misc_feature: 669 for SV(C|G) and mtDNA

SEQ ID NO: 83756 - DNA, 120 bp, Homo sapiens; identical to SEQ ID NO: 74175
  misc_feature: 667 for SV(C|G) and mtDNA

SEQ ID NO: 83757 - DNA, 120 bp, Homo sapiens; identical to SEQ ID NO: 74271
  misc_feature: 665 for SV(C|G) and mtDNA

SEQ ID NO: 83758 - DNA, 120 bp, Homo sapiens; identical to SEQ ID NO: 74318
  misc_feature: 664 for SV(C|G) and mtDNA

SEQ ID NO: 83759 - DNA, 120 bp, Homo sapiens; identical to SEQ ID NO: 74337
  misc_feature: 664 for SV(C|G) and mtDNA

SEQ ID NO: 83760 - DNA, 120 bp, Homo sapiens; identical to SEQ ID NO: 55116
  misc_feature: 663 for SV(C|G) and mtDNA

SEQ ID NO: 83761 - DNA, 120 bp, Homo sapiens; identical to SEQ ID NO: 74499
  misc_feature: 660 for SV(C|G) and mtDNA

SEQ ID NO: 83762 - DNA, 120 bp, Homo sapiens; identical to SEQ ID NO: 74514
  misc_feature: 660 for SV(C|G) and mtDNA

SEQ ID NO: 83763 - DNA, 120 bp, Homo sapiens; identical to SEQ ID NO: 74569
  misc_feature: 658 for SV(C|G) and mtDNA

SEQ ID NO: 83764 - DNA, 120 bp, Homo sapiens; identical to SEQ ID NO: 74809
  misc_feature: 653 for SV(C|G) and mtDNA

SEQ ID NO: 83765 - DNA, 120 bp, Homo sapiens; identical to SEQ ID NO: 52311
  misc_feature: 649 for SV(C|G) and mtDNA

SEQ ID NO: 83766 - DNA, 120 bp, Homo sapiens; identical to SEQ ID NO: 63105
  misc_feature: 644 for SV(C|G) and mtDNA

SEQ ID NO: 83767 - DNA, 120 bp, Homo sapiens; identical to SEQ ID NO: 75261
  misc_feature: 641 for SV(C|G) and mtDNA

SEQ ID NO: 83768 - DNA, 120 bp, Homo sapiens; identical to SEQ ID NO: 75310
  misc_feature: 640 for SV(C|G) and mtDNA

SEQ ID NO: 83769 - DNA, 120 bp, Homo sapiens; identical to SEQ ID NO: 75578
  misc_feature: 634 for SV(C|G) and mtDNA

SEQ ID NO: 83770 - DNA, 120 bp, Homo sapiens; identical to SEQ ID NO: 75581
  misc_feature: 634 for SV(C|G) and mtDNA

SEQ ID NO: 83771 - DNA, 120 bp, Homo sapiens; identical to SEQ ID NO: 75660
  misc_feature: 632 for SV(C|G) and mtDNA

SEQ ID NO: 83772 - DNA, 120 bp, Homo sapiens; identical to SEQ ID NO: 75711
  misc_feature: 631 for SV(C|G) and mtDNA

SEQ ID NO: 83773 - DNA, 120 bp, Homo sapiens; identical to SEQ ID NO: 75819
  misc_feature: 629 for SV(C|G) and mtDNA

SEQ ID NO: 83774 - DNA, 120 bp, Homo sapiens; identical to SEQ ID NO: 63110
  misc_feature: 628 for SV(C|G) and mtDNA

SEQ ID NO: 83775 - DNA, 120 bp, Homo sapiens; identical to SEQ ID NO: 76368
  misc_feature: 616 for SV(C|G) and mtDNA

SEQ ID NO: 83776 - DNA, 120 bp, Homo sapiens; identical to SEQ ID NO: 63102
  misc_feature: 616 for SV(C|G) and mtDNA

SEQ ID NO: 83777 - DNA, 120 bp, Homo sapiens; identical to SEQ ID NO: 76601
  misc_feature: 609 for SV(C|G) and mtDNA

SEQ ID NO: 83778 - DNA, 120 bp, Homo sapiens; identical to SEQ ID NO: 77098
  misc_feature: 597 for SV(C|G) and mtDNA

SEQ ID NO: 83779 - DNA, 120 bp, Homo sapiens; identical to SEQ ID NO: 77160
  misc_feature: 596 for SV(C|G) and mtDNA

SEQ ID NO: 83780 - DNA, 120 bp, Homo sapiens; identical to SEQ ID NO: 63153
  misc_feature: 592 for SV(C|G) and mtDNA

SEQ ID NO: 83781 - DNA, 120 bp, Homo sapiens; identical to SEQ ID NO: 77488
  misc_feature: 590 for SV(C|G) and mtDNA

SEQ ID NO: 83782 - DNA, 120 bp, Homo sapiens; identical to SEQ ID NO: 63176
  misc_feature: 590 for SV(C|G) and mtDNA

SEQ ID NO: 83783 - DNA, 120 bp, Homo sapiens; identical to SEQ ID NO: 63155
  misc_feature: 587 for SV(C|G) and mtDNA

SEQ ID NO: 83784 - DNA, 120 bp, Homo sapiens; identical to SEQ ID NO: 77927
  misc_feature: 581 for SV(C|G) and mtDNA

SEQ ID NO: 83785 - DNA, 120 bp, Homo sapiens; identical to SEQ ID NO: 77982
  misc_feature: 579 for SV(C|G) and mtDNA

SEQ ID NO: 83786 - DNA, 120 bp, Homo sapiens; identical to SEQ ID NO: 63200
  misc_feature: 579 for SV(C|G) and mtDNA

SEQ ID NO: 83787 - DNA, 120 bp, Homo sapiens; identical to SEQ ID NO: 63212
  misc_feature: 577 for SV(C|G) and mtDNA

SEQ ID NO: 83788 - DNA, 120 bp, Homo sapiens; identical to SEQ ID NO: 78249
  misc_feature: 573 for SV(C|G) and mtDNA

SEQ ID NO: 83789 - DNA, 120 bp, Homo sapiens; identical to SEQ ID NO: 78417
  misc_feature: 568 for SV(C|G) and mtDNA

SEQ ID NO: 83790 - DNA, 120 bp, Homo sapiens; identical to SEQ ID NO: 63215
  misc_feature: 568 for SV(C|G) and mtDNA

SEQ ID NO: 83791 - DNA, 120 bp, Homo sapiens; identical to SEQ ID NO: 78439
  misc_feature: 568 for SV(C|G) and mtDNA

SEQ ID NO: 83792 - DNA, 120 bp, Homo sapiens; identical to SEQ ID NO: 78442
  misc_feature: 568 for SV(C|G) and mtDNA

SEQ ID NO: 83793 - DNA, 120 bp, Homo sapiens; identical to SEQ ID NO: 63247
  misc_feature: 567 for SV(C|G) and mtDNA

SEQ ID NO: 83794 - DNA, 120 bp, Homo sapiens; identical to SEQ ID NO: 63246
  misc_feature: 567 for SV(C|G) and mtDNA

SEQ ID NO: 83795 - DNA, 120 bp, Homo sapiens; identical to SEQ ID NO: 78502
  misc_feature: 566 for SV(C|G) and mtDNA

SEQ ID NO: 83796 - DNA, 120 bp, Homo sapiens; identical to SEQ ID NO: 78660
  misc_feature: 562 for SV(C|G) and mtDNA

SEQ ID NO: 83797 - DNA, 120 bp, Homo sapiens; identical to SEQ ID NO: 63245
  misc_feature: 562 for SV(C|G) and mtDNA

SEQ ID NO: 83798 - DNA, 120 bp, Homo sapiens; identical to SEQ ID NO: 63243
  misc_feature: 561 for SV(C|G) and mtDNA

SEQ ID NO: 83799 - DNA, 120 bp, Homo sapiens; identical to SEQ ID NO: 78697
  misc_feature: 560 for SV(C|G) and mtDNA

SEQ ID NO: 83800 - DNA, 120 bp, Homo sapiens; identical to SEQ ID NO: 78719
  misc_feature: 560 for SV(C|G) and mtDNA

SEQ ID NO: 83801 - DNA, 120 bp, Homo sapiens; identical to SEQ ID NO: 78787
  misc_feature: 558 for SV(C|G) and mtDNA

SEQ ID NO: 83802 - DNA, 120 bp, Homo sapiens; identical to SEQ ID NO: 63238
  misc_feature: 558 for SV(C|G) and mtDNA

SEQ ID NO: 83803 - DNA, 120 bp, Homo sapiens; identical to SEQ ID NO: 63225
  misc_feature: 558 for SV(C|G) and mtDNA

SEQ ID NO: 83804 - DNA, 120 bp, Homo sapiens; identical to SEQ ID NO: 63242
  misc_feature: 557 for SV(C|G) and mtDNA

SEQ ID NO: 83805 - DNA, 120 bp, Homo sapiens; identical to SEQ ID NO: 63234
  misc_feature: 556 for SV(C|G) and mtDNA

SEQ ID NO: 83806 - DNA, 120 bp, Homo sapiens; identical to SEQ ID NO: 63221
  misc_feature: 555 for SV(C|G) and mtDNA

SEQ ID NO: 83807 - DNA, 120 bp, Homo sapiens; identical to SEQ ID NO: 63235
  misc_feature: 555 for SV(C|G) and mtDNA

SEQ ID NO: 83808 - DNA, 120 bp, Homo sapiens; identical to SEQ ID NO: 79018
  misc_feature: 550 for SV(C|G) and mtDNA

SEQ ID NO: 83809 - DNA, 120 bp, Homo sapiens; identical to SEQ ID NO: 63231
  misc_feature: 550 for SV(C|G) and mtDNA

SEQ ID NO: 83810 - DNA, 120 bp, Homo sapiens; identical to SEQ ID NO: 63216
  misc_feature: 549 for SV(C|G) and mtDNA

SEQ ID NO: 83811 - DNA, 120 bp, Homo sapiens; identical to SEQ ID NO: 79054
  misc_feature: 549 for SV(C|G) and mtDNA

SEQ ID NO: 83812 - DNA, 120 bp, Homo sapiens; identical to SEQ ID NO: 63218
  misc_feature: 549 for SV(C|G) and mtDNA

SEQ ID NO: 83813 - DNA, 120 bp, Homo sapiens; identical to SEQ ID NO: 63217
  misc_feature: 549 for SV(C|G) and mtDNA

SEQ ID NO: 83814 - DNA, 120 bp, Homo sapiens; identical to SEQ ID NO: 79114
  misc_feature: 547 for SV(C|G) and mtDNA

SEQ ID NO: 83815 - DNA, 120 bp, Homo sapiens; identical to SEQ ID NO: 63239
  misc_feature: 547 for SV(C|G) and mtDNA

SEQ ID NO: 83816 - DNA, 120 bp, Homo sapiens; identical to SEQ ID NO: 63241
  misc_feature: 546 for SV(C|G) and mtDNA

SEQ ID NO: 83817 - DNA, 120 bp, Homo sapiens; identical to SEQ ID NO: 63240
  misc_feature: 545 for SV(C|G) and mtDNA

SEQ ID NO: 83818 - DNA, 120 bp, Homo sapiens; identical to SEQ ID NO: 79266
  misc_feature: 543 for SV(C|G) and mtDNA

SEQ ID NO: 83819 - DNA, 120 bp, Homo sapiens; identical to SEQ ID NO: 79374
  misc_feature: 541 for SV(C|G) and mtDNA

SEQ ID NO: 83820 - DNA, 120 bp, Homo sapiens; identical to SEQ ID NO: 63229
  misc_feature: 539 for SV(C|G) and mtDNA

SEQ ID NO: 83821 - DNA, 120 bp, Homo sapiens; identical to SEQ ID NO: 63219
  misc_feature: 535 for SV(C|G) and mtDNA

SEQ ID NO: 83822 - DNA, 120 bp, Homo sapiens; identical to SEQ ID NO: 79787
  misc_feature: 528 for SV(C|G) and mtDNA

SEQ ID NO: 83823 - DNA, 120 bp, Homo sapiens; identical to SEQ ID NO: 80090
  misc_feature: 519 for SV(C|G) and mtDNA

SEQ ID NO: 83824 - DNA, 120 bp, Homo sapiens; identical to SEQ ID NO: 80225
  misc_feature: 515 for SV(C|G) and mtDNA

SEQ ID NO: 83825 - DNA, 120 bp, Homo sapiens; identical to SEQ ID NO: 80307
  misc_feature: 512 for SV(C|G) and mtDNA

SEQ ID NO: 83826 - DNA, 120 bp, Homo sapiens; identical to SEQ ID NO: 80369
  misc_feature: 511 for SV(C|G) and mtDNA

SEQ ID NO: 83827 - DNA, 120 bp, Homo sapiens; identical to SEQ ID NO: 80666
  misc_feature: 502 for SV(C|G) and mtDNA

SEQ ID NO: 83828 - DNA, 120 bp, Homo sapiens; identical to SEQ ID NO: 62929
  misc_feature: 500 for SV(C|G) and mtDNA

SEQ ID NO: 83829 - DNA, 120 bp, Homo sapiens; identical to SEQ ID NO: 80809
  misc_feature: 497 for SV(C|G) and mtDNA

SEQ ID NO: 83830 - DNA, 120 bp, Homo sapiens; identical to SEQ ID NO: 80821
  misc_feature: 497 for SV(C|G) and mtDNA

SEQ ID NO: 83831 - DNA, 120 bp, Homo sapiens; identical to SEQ ID NO: 80866
  misc_feature: 495 for SV(C|G) and mtDNA

SEQ ID NO: 83832 - DNA, 120 bp, Homo sapiens; identical to SEQ ID NO: 80944
  misc_feature: 491 for SV(C|G) and mtDNA

SEQ ID NO: 83833 - DNA, 120 bp, Homo sapiens; identical to SEQ ID NO: 80950
  misc_feature: 491 for SV(C|G) and mtDNA

SEQ ID NO: 83834 - DNA, 120 bp, Homo sapiens; identical to SEQ ID NO: 80968
  misc_feature: 490 for SV(C|G) and mtDNA

SEQ ID NO: 83835 - DNA, 120 bp, Homo sapiens; identical to SEQ ID NO: 80971
  misc_feature: 490 for SV(C|G) and mtDNA

SEQ ID NO: 83836 - DNA, 120 bp, Homo sapiens; identical to SEQ ID NO: 80982
  misc_feature: 490 for SV(C|G) and mtDNA

SEQ ID NO: 83837 - DNA, 120 bp, Homo sapiens; identical to SEQ ID NO: 81042
  misc_feature: 487 for SV(C|G) and mtDNA

SEQ ID NO: 83838 - DNA, 120 bp, Homo sapiens; identical to SEQ ID NO: 81108
  misc_feature: 484 for SV(C|G) and mtDNA

SEQ ID NO: 83839 - DNA, 120 bp, Homo sapiens; identical to SEQ ID NO: 62915
  misc_feature: 480 for SV(C|G) and mtDNA

SEQ ID NO: 83840 - DNA, 120 bp, Homo sapiens; identical to SEQ ID NO: 81224
  misc_feature: 480 for SV(C|G) and mtDNA

SEQ ID NO: 83841 - DNA, 120 bp, Homo sapiens; identical to SEQ ID NO: 81357
  misc_feature: 473 for SV(C|G) and mtDNA

SEQ ID NO: 83842 - DNA, 120 bp, Homo sapiens; identical to SEQ ID NO: 81367
  misc_feature: 472 for SV(C|G) and mtDNA

SEQ ID NO: 83843 - DNA, 120 bp, Homo sapiens; identical to SEQ ID NO: 81389
  misc_feature: 471 for SV(C|G) and mtDNA

SEQ ID NO: 83844 - DNA, 120 bp, Homo sapiens; identical to SEQ ID NO: 81421
  misc_feature: 469 for SV(C|G) and mtDNA

SEQ ID NO: 83845 - DNA, 120 bp, Homo sapiens; identical to SEQ ID NO: 81430
  misc_feature: 468 for SV(C|G) and mtDNA

SEQ ID NO: 83846 - DNA, 120 bp, Homo sapiens; identical to SEQ ID NO: 81463
  misc_feature: 466 for SV(C|G) and mtDNA

SEQ ID NO: 83847 - DNA, 120 bp, Homo sapiens; identical to SEQ ID NO: 81529
  misc_feature: 461 for SV(C|G) and mtDNA

SEQ ID NO: 83848 - DNA, 120 bp, Homo sapiens; identical to SEQ ID NO: 81538
  misc_feature: 461 for SV(C|G) and mtDNA

SEQ ID NO: 83849 - DNA, 120 bp, Homo sapiens; identical to SEQ ID NO: 81543
  misc_feature: 461 for SV(C|G) and mtDNA

SEQ ID NO: 83850 - DNA, 120 bp, Homo sapiens; identical to SEQ ID NO: 81577
  misc_feature: 458 for SV(C|G) and mtDNA

SEQ ID NO: 83851 - DNA, 120 bp, Homo sapiens; identical to SEQ ID NO: 81580
  misc_feature: 458 for SV(C|G) and mtDNA

SEQ ID NO: 83852 - DNA, 120 bp, Homo sapiens; identical to SEQ ID NO: 81611
  misc_feature: 455 for SV(C|G) and mtDNA

SEQ ID NO: 83853 - DNA, 120 bp, Homo sapiens; identical to SEQ ID NO: 81629
  misc_feature: 454 for SV(C|G) and mtDNA

SEQ ID NO: 83854 - DNA, 120 bp, Homo sapiens; identical to SEQ ID NO: 81680
  misc_feature: 450 for SV(C|G) and mtDNA

SEQ ID NO: 83855 - DNA, 120 bp, Homo sapiens; identical to SEQ ID NO: 81690
  misc_feature: 449 for SV(C|G) and mtDNA

SEQ ID NO: 83856 - DNA, 120 bp, Homo sapiens; identical to SEQ ID NO: 81758
  misc_feature: 445 for SV(C|G) and mtDNA

SEQ ID NO: 83857 - DNA, 120 bp, Homo sapiens; identical to SEQ ID NO: 62944
  misc_feature: 443 for SV(C|G) and mtDNA

SEQ ID NO: 83858 - DNA, 120 bp, Homo sapiens; identical to SEQ ID NO: 62954
  misc_feature: 442 for SV(C|G) and mtDNA

SEQ ID NO: 83859 - DNA, 120 bp, Homo sapiens; identical to SEQ ID NO: 62963
  misc_feature: 440 for SV(C|G) and mtDNA

SEQ ID NO: 83860 - DNA, 120 bp, Homo sapiens; identical to SEQ ID NO: 62964
  misc_feature: 439 for SV(C|G) and mtDNA

SEQ ID NO: 83861 - DNA, 120 bp, Homo sapiens; identical to SEQ ID NO: 81864
  misc_feature: 439 for SV(C|G) and mtDNA

SEQ ID NO: 83862 - DNA, 120 bp, Homo sapiens; identical to SEQ ID NO: 82379
  misc_feature: 384 for SV(C|G) and mtDNA

SEQ ID NO: 83863 - DNA, 120 bp, Homo sapiens; identical to SEQ ID NO: 82448
  misc_feature: 374 for SV(C|G) and mtDNA

SEQ ID NO: 83864 - DNA, 120 bp, Homo sapiens; identical to SEQ ID NO: 82464
  misc_feature: 372 for SV(C|G) and mtDNA

SEQ ID NO: 83865 - DNA, 120 bp, Homo sapiens; identical to SEQ ID NO: 82493
  misc_feature: 368 for SV(C|G) and mtDNA

SEQ ID NO: 83866 - DNA, 120 bp, Homo sapiens; identical to SEQ ID NO: 82508
  misc_feature: 366 for SV(C|G) and mtDNA

SEQ ID NO: 83867 - DNA, 120 bp, Homo sapiens; identical to SEQ ID NO: 82531
  misc_feature: 363 for SV(C|G) and mtDNA

SEQ ID NO: 83868 - DNA, 120 bp, Homo sapiens; identical to SEQ ID NO: 83159
  misc_feature: 336 for SV(W|C) and 28S

SEQ ID NO: 83869 - DNA, 120 bp, Homo sapiens; identical to SEQ ID NO: 83163
  misc_feature: 326 for SV(W|C) and 28S

SEQ ID NO: 83870 - DNA, 120 bp, Homo sapiens; identical to SEQ ID NO: 83166
  misc_feature: 321 for SV(W|C) and 28S

SEQ ID NO: 83871 - DNA, 120 bp, Homo sapiens
  misc_feature: 311 for SV(W|C) and 28S
gggcactccgcaccggaccccggtcccggcgcgcggcggggcacgcgccctcccgcgcgcgcggggcgcgtggaggggggggcggcccgccggcggggacaggcgggggaccggctatcc

SEQ ID NO: 83872 - DNA, 120 bp, Homo sapiens
  misc_feature: 309 for SV(W|C) and 28S
agggcactccgcaccggaccccggtcccggcgcgcggcggggcacgcgccctcccgcgcgcgcggggcgcgtggaggggggggcggcccgccggcggggacaggcgggggaccggctatc

SEQ ID NO: 83873 - DNA, 120 bp, Homo sapiens
  misc_feature: 309 for SV(W|C) and 28S
cactccgcaccggaccccggtcccggcgcgcggcggggcacgcgccctcccgcgcgcgcggggcgcgtggaggggggggcggcccgccggcggggacaggcgggggaccggctatccgag

SEQ ID NO: 83874 - DNA, 120 bp, Homo sapiens
  misc_feature: 309 for SV(W|C) and 28S
actccgcaccggaccccggtcccggcgcgcggcggggcacgcgccctcccgcgcgcgcggggcgcgtggaggggggggcggcccgccggcggggacaggcgggggaccggctatccgagg

SEQ ID NO: 83875 - DNA, 120 bp, Homo sapiens
  misc_feature: 305 for SV(W|C) and 28S
aagggcactccgcaccggaccccggtcccggcgcgcggcggggcacgcgccctcccgcgcgcgcggggcgcgtggaggggggggcggcccgccggcggggacaggcgggggaccggctat

SEQ ID NO: 83876 - DNA, 120 bp, Homo sapiens
  misc_feature: 304 for SV(W|C) and 28S
ggcactccgcaccggaccccggtcccggcgcgcggcggggcacgcgccctcccgcgcgcgcggggcgcgtggaggggggggcggcccgccggcggggacaggcgggggaccggctatccg

SEQ ID NO: 83877 - DNA, 120 bp, Homo sapiens
  misc_feature: 301 for SV(W|C) and 28S
gcactccgcaccggaccccggtcccggcgcgcggcggggcacgcgccctcccgcgcgcgcggggcgcgtggaggggggggcggcccgccggcggggacaggcgggggaccggctatccga

SEQ ID NO: 83878 - DNA, 120 bp, Homo sapiens; identical to SEQ ID NO: 51816
  misc_feature: 1738 for SV(W|C) and mtDNA

SEQ ID NO: 83879 - DNA, 120 bp, Homo sapiens; identical to SEQ ID NO: 51852
  misc_feature: 1727 for SV(W|C) and mtDNA

SEQ ID NO: 83880 - DNA, 120 bp, Homo sapiens; identical to SEQ ID NO: 51907
  misc_feature: 1712 for SV(W|C) and mtDNA

SEQ ID NO: 83881 - DNA, 120 bp, Homo sapiens; identical to SEQ ID NO: 51942
  misc_feature: 1705 for SV(W|C) and mtDNA

SEQ ID NO: 83882 - DNA, 120 bp, Homo sapiens; identical to SEQ ID NO: 51973
  misc_feature: 1699 for SV(W|C) and mtDNA

SEQ ID NO: 83883 - DNA, 120 bp, Homo sapiens; identical to SEQ ID NO: 51999
  misc_feature: 1693 for SV(W|C) and mtDNA

SEQ ID NO: 83884 - DNA, 120 bp, Homo sapiens; identical to SEQ ID NO: 52010
  misc_feature: 1691 for SV(W|C) and mtDNA

SEQ ID NO: 83885 - DNA, 120 bp, Homo sapiens; identical to SEQ ID NO: 52029
  misc_feature: 1688 for SV(W|C) and mtDNA

SEQ ID NO: 83886 - DNA, 120 bp, Homo sapiens; identical to SEQ ID NO: 52056
  misc_feature: 1685 for SV(W|C) and mtDNA

SEQ ID NO: 83887 - DNA, 120 bp, Homo sapiens; identical to SEQ ID NO: 52087
  misc_feature: 1680 for SV(W|C) and mtDNA

SEQ ID NO: 83888 - DNA, 120 bp, Homo sapiens; identical to SEQ ID NO: 52270
  misc_feature: 1663 for SV(W|C) and mtDNA

SEQ ID NO: 83889 - DNA, 120 bp, Homo sapiens; identical to SEQ ID NO: 52329
  misc_feature: 1659 for SV(W|C) and mtDNA

SEQ ID NO: 83890 - DNA, 120 bp, Homo sapiens; identical to SEQ ID NO: 52536
  misc_feature: 1644 for SV(W|C) and mtDNA

SEQ ID NO: 83891 - DNA, 120 bp, Homo sapiens; identical to SEQ ID NO: 52578
  misc_feature: 1642 for SV(W|C) and mtDNA

SEQ ID NO: 83892 - DNA, 120 bp, Homo sapiens; identical to SEQ ID NO: 52750
  misc_feature: 1631 for SV(W|C) and mtDNA

SEQ ID NO: 83893 - DNA, 120 bp, Homo sapiens; identical to SEQ ID NO: 52755
  misc_feature: 1630 for SV(W|C) and mtDNA

SEQ ID NO: 83894 - DNA, 120 bp, Homo sapiens; identical to SEQ ID NO: 52779
  misc_feature: 1628 for SV(W|C) and mtDNA

SEQ ID NO: 83895 - DNA, 120 bp, Homo sapiens; identical to SEQ ID NO: 52796
  misc_feature: 1627 for SV(W|C) and mtDNA

SEQ ID NO: 83896 - DNA, 120 bp, Homo sapiens; identical to SEQ ID NO: 52872
  misc_feature: 1623 for SV(W|C) and mtDNA

SEQ ID NO: 83897 - DNA, 120 bp, Homo sapiens; identical to SEQ ID NO: 52916
  misc_feature: 1619 for SV(W|C) and mtDNA

SEQ ID NO: 83898 - DNA, 120 bp, Homo sapiens; identical to SEQ ID NO: 53015
  misc_feature: 1614 for SV(W|C) and mtDNA

SEQ ID NO: 83899 - DNA, 120 bp, Homo sapiens; identical to SEQ ID NO: 53043
  misc_feature: 1613 for SV(W|C) and mtDNA

SEQ ID NO: 83900 - DNA, 120 bp, Homo sapiens; identical to SEQ ID NO: 53083
  misc_feature: 1610 for SV(W|C) and mtDNA

SEQ ID NO: 83901 - DNA, 120 bp, Homo sapiens; identical to SEQ ID NO: 53141
  misc_feature: 1608 for SV(W|C) and mtDNA

SEQ ID NO: 83902 - DNA, 120 bp, Homo sapiens; identical to SEQ ID NO: 53226
  misc_feature: 1603 for SV(W|C) and mtDNA

SEQ ID NO: 83903 - DNA, 120 bp, Homo sapiens; identical to SEQ ID NO: 53266
  misc_feature: 1601 for SV(W|C) and mtDNA

SEQ ID NO: 83904 - DNA, 120 bp, Homo sapiens; identical to SEQ ID NO: 53284
  misc_feature: 1600 for SV(W|C) and mtDNA

SEQ ID NO: 83905 - DNA, 120 bp, Homo sapiens; identical to SEQ ID NO: 53301
  misc_feature: 1599 for SV(W|C) and mtDNA

SEQ ID NO: 83906 - DNA, 120 bp, Homo sapiens; identical to SEQ ID NO: 53302
  misc_feature: 1599 for SV(W|C) and mtDNA

SEQ ID NO: 83907 - DNA, 120 bp, Homo sapiens; identical to SEQ ID NO: 53329
  misc_feature: 1598 for SV(W|C) and mtDNA

SEQ ID NO: 83908 - DNA, 120 bp, Homo sapiens; identical to SEQ ID NO: 53428
  misc_feature: 1592 for SV(W|C) and mtDNA

SEQ ID NO: 83909 - DNA, 120 bp, Homo sapiens; identical to SEQ ID NO: 53430
  misc_feature: 1592 for SV(W|C) and mtDNA

SEQ ID NO: 83910 - DNA, 120 bp, Homo sapiens; identical to SEQ ID NO: 53612
  misc_feature: 1583 for SV(W|C) and mtDNA

SEQ ID NO: 83911 - DNA, 120 bp, Homo sapiens; identical to SEQ ID NO: 53651
  misc_feature: 1581 for SV(W|C) and mtDNA

SEQ ID NO: 83912 - DNA, 120 bp, Homo sapiens; identical to SEQ ID NO: 53787
  misc_feature: 1574 for SV(W|C) and mtDNA

SEQ ID NO: 83913 - DNA, 120 bp, Homo sapiens; identical to SEQ ID NO: 54434
  misc_feature: 1548 for SV(W|C) and mtDNA

SEQ ID NO: 83914 - DNA, 120 bp, Homo sapiens; identical to SEQ ID NO: 54497
  misc_feature: 1546 for SV(W|C) and mtDNA

SEQ ID NO: 83915 - DNA, 120 bp, Homo sapiens; identical to SEQ ID NO: 59568
  misc_feature: 1364 for SV(W|C) and mtDNA

SEQ ID NO: 83916 - DNA, 120 bp, Homo sapiens; identical to SEQ ID NO: 59778
  misc_feature: 1355 for SV(W|C) and mtDNA

SEQ ID NO: 83917 - DNA, 120 bp, Homo sapiens; identical to SEQ ID NO: 59825
  misc_feature: 1354 for SV(W|C) and mtDNA

SEQ ID NO: 83918 - DNA, 120 bp, Homo sapiens; identical to SEQ ID NO: 60025
  misc_feature: 1346 for SV(W|C) and mtDNA

SEQ ID NO: 83919 - DNA, 120 bp, Homo sapiens; identical to SEQ ID NO: 60148
  misc_feature: 1341 for SV(W|C) and mtDNA

SEQ ID NO: 83920 - DNA, 120 bp, Homo sapiens; identical to SEQ ID NO: 60205
  misc_feature: 1339 for SV(W|C) and mtDNA

SEQ ID NO: 83921 - DNA, 120 bp, Homo sapiens; identical to SEQ ID NO: 60322
  misc_feature: 1335 for SV(W|C) and mtDNA

SEQ ID NO: 83922 - DNA, 120 bp, Homo sapiens; identical to SEQ ID NO: 60420
  misc_feature: 1332 for SV(W|C) and mtDNA

SEQ ID NO: 83923 - DNA, 120 bp, Homo sapiens; identical to SEQ ID NO: 60428
  misc_feature: 1332 for SV(W|C) and mtDNA

SEQ ID NO: 83924 - DNA, 120 bp, Homo sapiens; identical to SEQ ID NO: 60499
  misc_feature: 1328 for SV(W|C) and mtDNA

SEQ ID NO: 83925 - DNA, 120 bp, Homo sapiens; identical to SEQ ID NO: 60557
  misc_feature: 1327 for SV(W|C) and mtDNA

SEQ ID NO: 83926 - DNA, 120 bp, Homo sapiens; identical to SEQ ID NO: 60611
  misc_feature: 1325 for SV(W|C) and mtDNA

SEQ ID NO: 83927 - DNA, 120 bp, Homo sapiens; identical to SEQ ID NO: 60764
  misc_feature: 1318 for SV(W|C) and mtDNA

SEQ ID NO: 83928 - DNA, 120 bp, Homo sapiens; identical to SEQ ID NO: 60851
  misc_feature: 1314 for SV(W|C) and mtDNA

SEQ ID NO: 83929 - DNA, 120 bp, Homo sapiens; identical to SEQ ID NO: 60891
  misc_feature: 1312 for SV(W|C) and mtDNA

SEQ ID NO: 83930 - DNA, 120 bp, Homo sapiens; identical to SEQ ID NO: 60914
  misc_feature: 1311 for SV(W|C) and mtDNA

SEQ ID NO: 83931 - DNA, 120 bp, Homo sapiens; identical to SEQ ID NO: 60934
  misc_feature: 1310 for SV(W|C) and mtDNA

SEQ ID NO: 83932 - DNA, 120 bp, Homo sapiens; identical to SEQ ID NO: 60939
  misc_feature: 1310 for SV(W|C) and mtDNA

SEQ ID NO: 83933 - DNA, 120 bp, Homo sapiens; identical to SEQ ID NO: 60957
  misc_feature: 1309 for SV(W|C) and mtDNA

SEQ ID NO: 83934 - DNA, 120 bp, Homo sapiens; identical to SEQ ID NO: 61055
  misc_feature: 1304 for SV(W|C) and mtDNA

SEQ ID NO: 83935 - DNA, 120 bp, Homo sapiens; identical to SEQ ID NO: 61063
  misc_feature: 1304 for SV(W|C) and mtDNA

SEQ ID NO: 83936 - DNA, 120 bp, Homo sapiens; identical to SEQ ID NO: 61100
  misc_feature: 1302 for SV(W|C) and mtDNA

SEQ ID NO: 83937 - DNA, 120 bp, Homo sapiens; identical to SEQ ID NO: 61165
  misc_feature: 1299 for SV(W|C) and mtDNA

SEQ ID NO: 83938 - DNA, 120 bp, Homo sapiens; identical to SEQ ID NO: 61167
  misc_feature: 1299 for SV(W|C) and mtDNA

SEQ ID NO: 83939 - DNA, 120 bp, Homo sapiens; identical to SEQ ID NO: 61201
  misc_feature: 1297 for SV(W|C) and mtDNA

SEQ ID NO: 83940 - DNA, 120 bp, Homo sapiens; identical to SEQ ID NO: 61274
  misc_feature: 1293 for SV(W|C) and mtDNA

SEQ ID NO: 83941 - DNA, 120 bp, Homo sapiens; identical to SEQ ID NO: 61295
  misc_feature: 1292 for SV(W|C) and mtDNA

SEQ ID NO: 83942 - DNA, 120 bp, Homo sapiens; identical to SEQ ID NO: 61302
  misc_feature: 1292 for SV(W|C) and mtDNA

SEQ ID NO: 83943 - DNA, 120 bp, Homo sapiens; identical to SEQ ID NO: 61366
  misc_feature: 1289 for SV(W|C) and mtDNA

SEQ ID NO: 83944 - DNA, 120 bp, Homo sapiens; identical to SEQ ID NO: 61394
  misc_feature: 1287 for SV(W|C) and mtDNA

SEQ ID NO: 83945 - DNA, 120 bp, Homo sapiens; identical to SEQ ID NO: 61435
  misc_feature: 1285 for SV(W|C) and mtDNA

SEQ ID NO: 83946 - DNA, 120 bp, Homo sapiens; identical to SEQ ID NO: 61439
  misc_feature: 1285 for SV(W|C) and mtDNA

SEQ ID NO: 83947 - DNA, 120 bp, Homo sapiens; identical to SEQ ID NO: 61459
  misc_feature: 1284 for SV(W|C) and mtDNA

SEQ ID NO: 83948 - DNA, 120 bp, Homo sapiens; identical to SEQ ID NO: 61558
  misc_feature: 1278 for SV(W|C) and mtDNA

SEQ ID NO: 83949 - DNA, 120 bp, Homo sapiens; identical to SEQ ID NO: 61567
  misc_feature: 1276 for SV(W|C) and mtDNA

SEQ ID NO: 83950 - DNA, 120 bp, Homo sapiens; identical to SEQ ID NO: 61644
  misc_feature: 1272 for SV(W|C) and mtDNA

SEQ ID NO: 83951 - DNA, 120 bp, Homo sapiens; identical to SEQ ID NO: 61750
  misc_feature: 1265 for SV(W|C) and mtDNA

SEQ ID NO: 83952 - DNA, 120 bp, Homo sapiens; identical to SEQ ID NO: 61754
  misc_feature: 1264 for SV(W|C) and mtDNA

SEQ ID NO: 83953 - DNA, 120 bp, Homo sapiens; identical to SEQ ID NO: 61774
  misc_feature: 1262 for SV(W|C) and mtDNA

SEQ ID NO: 83954 - DNA, 120 bp, Homo sapiens; identical to SEQ ID NO: 61808
  misc_feature: 1260 for SV(W|C) and mtDNA

SEQ ID NO: 83955 - DNA, 120 bp, Homo sapiens; identical to SEQ ID NO: 61811
  misc_feature: 1260 for SV(W|C) and mtDNA

SEQ ID NO: 83956 - DNA, 120 bp, Homo sapiens; identical to SEQ ID NO: 61834
  misc_feature: 1257 for SV(W|C) and mtDNA

SEQ ID NO: 83957 - DNA, 120 bp, Homo sapiens; identical to SEQ ID NO: 61864
  misc_feature: 1255 for SV(W|C) and mtDNA

SEQ ID NO: 83958 - DNA, 120 bp, Homo sapiens; identical to SEQ ID NO: 61895
  misc_feature: 1253 for SV(W|C) and mtDNA

SEQ ID NO: 83959 - DNA, 120 bp, Homo sapiens; identical to SEQ ID NO: 61929
  misc_feature: 1251 for SV(W|C) and mtDNA

SEQ ID NO: 83960 - DNA, 120 bp, Homo sapiens; identical to SEQ ID NO: 61935
  misc_feature: 1250 for SV(W|C) and mtDNA

SEQ ID NO: 83961 - DNA, 120 bp, Homo sapiens; identical to SEQ ID NO: 61946
  misc_feature: 1249 for SV(W|C) and mtDNA

SEQ ID NO: 83962 - DNA, 120 bp, Homo sapiens; identical to SEQ ID NO: 61983
  misc_feature: 1246 for SV(W|C) and mtDNA

SEQ ID NO: 83963 - DNA, 120 bp, Homo sapiens; identical to SEQ ID NO: 62003
  misc_feature: 1244 for SV(W|C) and mtDNA

SEQ ID NO: 83964 - DNA, 120 bp, Homo sapiens; identical to SEQ ID NO: 62025
  misc_feature: 1242 for SV(W|C) and mtDNA

SEQ ID NO: 83965 - DNA, 120 bp, Homo sapiens; identical to SEQ ID NO: 62026
  misc_feature: 1242 for SV(W|C) and mtDNA

SEQ ID NO: 83966 - DNA, 120 bp, Homo sapiens; identical to SEQ ID NO: 62031
  misc_feature: 1242 for SV(W|C) and mtDNA

SEQ ID NO: 83967 - DNA, 120 bp, Homo sapiens; identical to SEQ ID NO: 62068
  misc_feature: 1238 for SV(W|C) and mtDNA

SEQ ID NO: 83968 - DNA, 120 bp, Homo sapiens; identical to SEQ ID NO: 62101
  misc_feature: 1235 for SV(W|C) and mtDNA

SEQ ID NO: 83969 - DNA, 120 bp, Homo sapiens; identical to SEQ ID NO: 62102
  misc_feature: 1235 for SV(W|C) and mtDNA

SEQ ID NO: 83970 - DNA, 120 bp, Homo sapiens; identical to SEQ ID NO: 62108
  misc_feature: 1235 for SV(W|C) and mtDNA

SEQ ID NO: 83971 - DNA, 120 bp, Homo sapiens; identical to SEQ ID NO: 62115
  misc_feature: 1234 for SV(W|C) and mtDNA

SEQ ID NO: 83972 - DNA, 120 bp, Homo sapiens; identical to SEQ ID NO: 62131
  misc_feature: 1233 for SV(W|C) and mtDNA

SEQ ID NO: 83973 - DNA, 120 bp, Homo sapiens; identical to SEQ ID NO: 62156
  misc_feature: 1230 for SV(W|C) and mtDNA

SEQ ID NO: 83974 - DNA, 120 bp, Homo sapiens; identical to SEQ ID NO: 62165
  misc_feature: 1228 for SV(W|C) and mtDNA

SEQ ID NO: 83975 - DNA, 120 bp, Homo sapiens; identical to SEQ ID NO: 62170
  misc_feature: 1228 for SV(W|C) and mtDNA

SEQ ID NO: 83976 - DNA, 120 bp, Homo sapiens; identical to SEQ ID NO: 62203
  misc_feature: 1224 for SV(W|C) and mtDNA

SEQ ID NO: 83977 - DNA, 120 bp, Homo sapiens; identical to SEQ ID NO: 62234
  misc_feature: 1219 for SV(W|C) and mtDNA

SEQ ID NO: 83978 - DNA, 120 bp, Homo sapiens; identical to SEQ ID NO: 62294
  misc_feature: 1212 for SV(W|C) and mtDNA

SEQ ID NO: 83979 - DNA, 120 bp, Homo sapiens; identical to SEQ ID NO: 62319
  misc_feature: 1208 for SV(W|C) and mtDNA

SEQ ID NO: 83980 - DNA, 120 bp, Homo sapiens; identical to SEQ ID NO: 62428
  misc_feature: 1188 for SV(W|C) and mtDNA

SEQ ID NO: 83981 - DNA, 120 bp, Homo sapiens; identical to SEQ ID NO: 62464
  misc_feature: 1182 for SV(W|C) and mtDNA

SEQ ID NO: 83982 - DNA, 120 bp, Homo sapiens; identical to SEQ ID NO: 62481
  misc_feature: 1179 for SV(W|C) and mtDNA

SEQ ID NO: 83983 - DNA, 120 bp, Homo sapiens; identical to SEQ ID NO: 62495
  misc_feature: 1174 for SV(W|C) and mtDNA

SEQ ID NO: 83984 - DNA, 120 bp, Homo sapiens; identical to SEQ ID NO: 62657
  misc_feature: 1121 for SV(W|C) and mtDNA

SEQ ID NO: 83985 - DNA, 120 bp, Homo sapiens; identical to SEQ ID NO: 63071
  misc_feature: 546 for SV(W|C) and mtDNA

SEQ ID NO: 83986 - DNA, 120 bp, Homo sapiens; identical to SEQ ID NO: 63072
  misc_feature: 545 for SV(W|C) and mtDNA

SEQ ID NO: 83987 - DNA, 120 bp, Homo sapiens; identical to SEQ ID NO: 63073
  misc_feature: 542 for SV(W|C) and mtDNA

SEQ ID NO: 83988 - DNA, 120 bp, Homo sapiens; identical to SEQ ID NO: 63074
  misc_feature: 539 for SV(W|C) and mtDNA

SEQ ID NO: 83989 - DNA, 120 bp, Homo sapiens; identical to SEQ ID NO: 63075
  misc_feature: 538 for SV(W|C) and mtDNA

SEQ ID NO: 83990 - DNA, 120 bp, Homo sapiens; identical to SEQ ID NO: 63076
  misc_feature: 534 for SV(W|C) and mtDNA

SEQ ID NO: 83991 - DNA, 120 bp, Homo sapiens; identical to SEQ ID NO: 63077
  misc_feature: 534 for SV(W|C) and mtDNA

SEQ ID NO: 83992 - DNA, 120 bp, Homo sapiens; identical to SEQ ID NO: 63078
  misc_feature: 533 for SV(W|C) and mtDNA

SEQ ID NO: 83993 - DNA, 120 bp, Homo sapiens; identical to SEQ ID NO: 63080
  misc_feature: 530 for SV(W|C) and mtDNA

SEQ ID NO: 83994 - DNA, 120 bp, Homo sapiens; identical to SEQ ID NO: 63081
  misc_feature: 528 for SV(W|C) and mtDNA

SEQ ID NO: 83995 - DNA, 120 bp, Homo sapiens; identical to SEQ ID NO: 63083
  misc_feature: 525 for SV(W|C) and mtDNA

SEQ ID NO: 83996 - DNA, 120 bp, Homo sapiens; identical to SEQ ID NO: 63084
  misc_feature: 523 for SV(W|C) and mtDNA

SEQ ID NO: 83997 - DNA, 120 bp, Homo sapiens; identical to SEQ ID NO: 63088
  misc_feature: 519 for SV(W|C) and mtDNA

SEQ ID NO: 83998 - DNA, 120 bp, Homo sapiens; identical to SEQ ID NO: 63090
  misc_feature: 513 for SV(W|C) and mtDNA

SEQ ID NO: 83999 - DNA, 120 bp, Homo sapiens; identical to SEQ ID NO: 63096
  misc_feature: 504 for SV(W|C) and mtDNA

SEQ ID NO: 84000 - DNA, 120 bp, Homo sapiens; identical to SEQ ID NO: 63115
  misc_feature: 499 for SV(W|C) and mtDNA

SEQ ID NO: 84001 - DNA, 120 bp, Homo sapiens; identical to SEQ ID NO: 63119
  misc_feature: 497 for SV(W|C) and mtDNA

SEQ ID NO: 84002 - DNA, 120 bp, Homo sapiens; identical to SEQ ID NO: 63141
  misc_feature: 488 for SV(W|C) and mtDNA

SEQ ID NO: 84003 - DNA, 120 bp, Homo sapiens; identical to SEQ ID NO: 63143
  misc_feature: 488 for SV(W|C) and mtDNA

SEQ ID NO: 84004 - DNA, 120 bp, Homo sapiens; identical to SEQ ID NO: 63144
  misc_feature: 487 for SV(W|C) and mtDNA

SEQ ID NO: 84005 - DNA, 120 bp, Homo sapiens; identical to SEQ ID NO: 63165
  misc_feature: 478 for SV(W|C) and mtDNA

SEQ ID NO: 84006 - DNA, 120 bp, Homo sapiens; identical to SEQ ID NO: 63170
  misc_feature: 477 for SV(W|C) and mtDNA

SEQ ID NO: 84007 - DNA, 120 bp, Homo sapiens; identical to SEQ ID NO: 63171
  misc_feature: 475 for SV(W|C) and mtDNA

SEQ ID NO: 84008 - DNA, 120 bp, Homo sapiens; identical to SEQ ID NO: 63174
  misc_feature: 471 for SV(W|C) and mtDNA

SEQ ID NO: 84009 - DNA, 120 bp, Homo sapiens; identical to SEQ ID NO: 63178
  misc_feature: 469 for SV(W|C) and mtDNA

SEQ ID NO: 84010 - DNA, 120 bp, Homo sapiens; identical to SEQ ID NO: 63179
  misc_feature: 469 for SV(W|C) and mtDNA

SEQ ID NO: 84011 - DNA, 120 bp, Homo sapiens; identical to SEQ ID NO: 63182
  misc_feature: 468 for SV(W|C) and mtDNA

SEQ ID NO: 84012 - DNA, 120 bp, Homo sapiens; identical to SEQ ID NO: 63188
  misc_feature: 465 for SV(W|C) and mtDNA

SEQ ID NO: 84013 - DNA, 120 bp, Homo sapiens; identical to SEQ ID NO: 63189
  misc_feature: 464 for SV(W|C) and mtDNA

SEQ ID NO: 84014 - DNA, 120 bp, Homo sapiens; identical to SEQ ID NO: 63191
  misc_feature: 462 for SV(W|C) and mtDNA

SEQ ID NO: 84015 - DNA, 120 bp, Homo sapiens; identical to SEQ ID NO: 63196
  misc_feature: 458 for SV(W|C) and mtDNA

SEQ ID NO: 84016 - DNA, 120 bp, Homo sapiens; identical to SEQ ID NO: 63197
  misc_feature: 457 for SV(W|C) and mtDNA

SEQ ID NO: 84017 - DNA, 120 bp, Homo sapiens; identical to SEQ ID NO: 63201
  misc_feature: 454 for SV(W|C) and mtDNA

SEQ ID NO: 84018 - DNA, 120 bp, Homo sapiens; identical to SEQ ID NO: 63202
  misc_feature: 452 for SV(W|C) and mtDNA

SEQ ID NO: 84019 - DNA, 120 bp, Homo sapiens; identical to SEQ ID NO: 63204
  misc_feature: 452 for SV(W|C) and mtDNA

SEQ ID NO: 84020 - DNA, 120 bp, Homo sapiens; identical to SEQ ID NO: 63205
  misc_feature: 451 for SV(W|C) and mtDNA

SEQ ID NO: 84021 - DNA, 120 bp, Homo sapiens; identical to SEQ ID NO: 63207
  misc_feature: 449 for SV(W|C) and mtDNA

SEQ ID NO: 84022 - DNA, 120 bp, Homo sapiens; identical to SEQ ID NO: 63213
  misc_feature: 440 for SV(W|C) and mtDNA

SEQ ID NO: 84023 - DNA, 120 bp, Homo sapiens; identical to SEQ ID NO: 63220
  misc_feature: 433 for SV(W|C) and mtDNA

SEQ ID NO: 84024 - DNA, 120 bp, Homo sapiens; identical to SEQ ID NO: 63226
  misc_feature: 429 for SV(W|C) and mtDNA

SEQ ID NO: 84025 - DNA, 120 bp, Homo sapiens; identical to SEQ ID NO: 63232
  misc_feature: 426 for SV(W|C) and mtDNA

SEQ ID NO: 84026 - DNA, 120 bp, Homo sapiens; identical to SEQ ID NO: 68837
  misc_feature: 811 for SV(C|W) and mtDNA

SEQ ID NO: 84027 - DNA, 120 bp, Homo sapiens; identical to SEQ ID NO: 69058
  misc_feature: 799 for SV(C|W) and mtDNA

SEQ ID NO: 84028 - DNA, 120 bp, Homo sapiens; identical to SEQ ID NO: 69448
  misc_feature: 782 for SV(C|W) and mtDNA

SEQ ID NO: 84029 - DNA, 120 bp, Homo sapiens; identical to SEQ ID NO: 69738
  misc_feature: 771 for SV(C|W) and mtDNA

SEQ ID NO: 84030 - DNA, 120 bp, Homo sapiens; identical to SEQ ID NO: 69939
  misc_feature: 765 for SV(C|W) and mtDNA

SEQ ID NO: 84031 - DNA, 120 bp, Homo sapiens; identical to SEQ ID NO: 70452
  misc_feature: 751 for SV(C|W) and mtDNA

SEQ ID NO: 84032 - DNA, 120 bp, Homo sapiens; identical to SEQ ID NO: 70674
  misc_feature: 745 for SV(C|W) and mtDNA

SEQ ID NO: 84033 - DNA, 120 bp, Homo sapiens; identical to SEQ ID NO: 70850
  misc_feature: 741 for SV(C|W) and mtDNA

SEQ ID NO: 84034 - DNA, 120 bp, Homo sapiens; identical to SEQ ID NO: 70886
  misc_feature: 740 for SV(C|W) and mtDNA

SEQ ID NO: 84035 - DNA, 120 bp, Homo sapiens; identical to SEQ ID NO: 71023
  misc_feature: 736 for SV(C|W) and mtDNA

SEQ ID NO: 84036 - DNA, 120 bp, Homo sapiens; identical to SEQ ID NO: 71083
  misc_feature: 735 for SV(C|W) and mtDNA

SEQ ID NO: 84037 - DNA, 120 bp, Homo sapiens; identical to SEQ ID NO: 71368
  misc_feature: 728 for SV(C|W) and mtDNA

SEQ ID NO: 84038 - DNA, 120 bp, Homo sapiens; identical to SEQ ID NO: 71510
  misc_feature: 724 for SV(C|W) and mtDNA

SEQ ID NO: 84039 - DNA, 120 bp, Homo sapiens; identical to SEQ ID NO: 71823
  misc_feature: 717 for SV(C|W) and mtDNA

SEQ ID NO: 84040 - DNA, 120 bp, Homo sapiens; identical to SEQ ID NO: 71839
  misc_feature: 717 for SV(C|W) and mtDNA

SEQ ID NO: 84041 - DNA, 120 bp, Homo sapiens; identical to SEQ ID NO: 72131
  misc_feature: 710 for SV(C|W) and mtDNA

SEQ ID NO: 84042 - DNA, 120 bp, Homo sapiens; identical to SEQ ID NO: 72242
  misc_feature: 708 for SV(C|W) and mtDNA

SEQ ID NO: 84043 - DNA, 120 bp, Homo sapiens; identical to SEQ ID NO: 72251
  misc_feature: 707 for SV(C|W) and mtDNA

SEQ ID NO: 84044 - DNA, 120 bp, Homo sapiens; identical to SEQ ID NO: 73412
  misc_feature: 682 for SV(C|W) and mtDNA

SEQ ID NO: 84045 - DNA, 120 bp, Homo sapiens; identical to SEQ ID NO: 73529
  misc_feature: 680 for SV(C|W) and mtDNA

SEQ ID NO: 84046 - DNA, 120 bp, Homo sapiens; identical to SEQ ID NO: 73535
  misc_feature: 680 for SV(C|W) and mtDNA

SEQ ID NO: 84047 - DNA, 120 bp, Homo sapiens; identical to SEQ ID NO: 73612
  misc_feature: 679 for SV(C|W) and mtDNA

SEQ ID NO: 84048 - DNA, 120 bp, Homo sapiens; identical to SEQ ID NO: 73665
  misc_feature: 677 for SV(C|W) and mtDNA

SEQ ID NO: 84049 - DNA, 120 bp, Homo sapiens; identical to SEQ ID NO: 74080
  misc_feature: 669 for SV(C|W) and mtDNA

SEQ ID NO: 84050 - DNA, 120 bp, Homo sapiens; identical to SEQ ID NO: 74422
  misc_feature: 661 for SV(C|W) and mtDNA

SEQ ID NO: 84051 - DNA, 120 bp, Homo sapiens; identical to SEQ ID NO: 74466
  misc_feature: 660 for SV(C|W) and mtDNA

SEQ ID NO: 84052 - DNA, 120 bp, Homo sapiens; identical to SEQ ID NO: 74471
  misc_feature: 660 for SV(C|W) and mtDNA

SEQ ID NO: 84053 - DNA, 120 bp, Homo sapiens; identical to SEQ ID NO: 74558
  misc_feature: 658 for SV(C|W) and mtDNA

SEQ ID NO: 84054 - DNA, 120 bp, Homo sapiens; identical to SEQ ID NO: 74569
  misc_feature: 658 for SV(C|W) and mtDNA

SEQ ID NO: 84055 - DNA, 120 bp, Homo sapiens; identical to SEQ ID NO: 74578
  misc_feature: 658 for SV(C|W) and mtDNA

SEQ ID NO: 84056 - DNA, 120 bp, Homo sapiens; identical to SEQ ID NO: 74600
  misc_feature: 657 for SV(C|W) and mtDNA

SEQ ID NO: 84057 - DNA, 120 bp, Homo sapiens; identical to SEQ ID NO: 74727
  misc_feature: 654 for SV(C|W) and mtDNA

SEQ ID NO: 84058 - DNA, 120 bp, Homo sapiens; identical to SEQ ID NO: 74790
  misc_feature: 653 for SV(C|W) and mtDNA

SEQ ID NO: 84059 - DNA, 120 bp, Homo sapiens; identical to SEQ ID NO: 74849
  misc_feature: 652 for SV(C|W) and mtDNA

SEQ ID NO: 84060 - DNA, 120 bp, Homo sapiens; identical to SEQ ID NO: 74866
  misc_feature: 651 for SV(C|W) and mtDNA

SEQ ID NO: 84061 - DNA, 120 bp, Homo sapiens; identical to SEQ ID NO: 74960
  misc_feature: 649 for SV(C|W) and mtDNA

SEQ ID NO: 84062 - DNA, 120 bp, Homo sapiens; identical to SEQ ID NO: 75188
  misc_feature: 643 for SV(C|W) and mtDNA

SEQ ID NO: 84063 - DNA, 120 bp, Homo sapiens; identical to SEQ ID NO: 75261
  misc_feature: 641 for SV(C|W) and mtDNA

SEQ ID NO: 84064 - DNA, 120 bp, Homo sapiens; identical to SEQ ID NO: 75345
  misc_feature: 639 for SV(C|W) and mtDNA

SEQ ID NO: 84065 - DNA, 120 bp, Homo sapiens; identical to SEQ ID NO: 75797
  misc_feature: 629 for SV(C|W) and mtDNA

SEQ ID NO: 84066 - DNA, 120 bp, Homo sapiens; identical to SEQ ID NO: 75820
  misc_feature: 629 for SV(C|W) and mtDNA

SEQ ID NO: 84067 - DNA, 120 bp, Homo sapiens; identical to SEQ ID NO: 75825
  misc_feature: 629 for SV(C|W) and mtDNA

SEQ ID NO: 84068 - DNA, 120 bp, Homo sapiens; identical to SEQ ID NO: 75870
  misc_feature: 628 for SV(C|W) and mtDNA

SEQ ID NO: 84069 - DNA, 120 bp, Homo sapiens; identical to SEQ ID NO: 76078
  misc_feature: 623 for SV(C|W) and mtDNA

SEQ ID NO: 84070 - DNA, 120 bp, Homo sapiens; identical to SEQ ID NO: 76180
  misc_feature: 621 for SV(C|W) and mtDNA

SEQ ID NO: 84071 - DNA, 120 bp, Homo sapiens; identical to SEQ ID NO: 76196
  misc_feature: 621 for SV(C|W) and mtDNA

SEQ ID NO: 84072 - DNA, 120 bp, Homo sapiens; identical to SEQ ID NO: 76271
  misc_feature: 619 for SV(C|W) and mtDNA

SEQ ID NO: 84073 - DNA, 120 bp, Homo sapiens; identical to SEQ ID NO: 76313
  misc_feature: 617 for SV(C|W) and mtDNA

SEQ ID NO: 84074 - DNA, 120 bp, Homo sapiens; identical to SEQ ID NO: 76340
  misc_feature: 617 for SV(C|W) and mtDNA

SEQ ID NO: 84075 - DNA, 120 bp, Homo sapiens; identical to SEQ ID NO: 76410
  misc_feature: 614 for SV(C|W) and mtDNA

SEQ ID NO: 84076 - DNA, 120 bp, Homo sapiens; identical to SEQ ID NO: 76523
  misc_feature: 611 for SV(C|W) and mtDNA

SEQ ID NO: 84077 - DNA, 120 bp, Homo sapiens; identical to SEQ ID NO: 77245
  misc_feature: 595 for SV(C|W) and mtDNA

SEQ ID NO: 84078 - DNA, 120 bp, Homo sapiens; identical to SEQ ID NO: 77408
  misc_feature: 592 for SV(C|W) and mtDNA

SEQ ID NO: 84079 - DNA, 120 bp, Homo sapiens; identical to SEQ ID NO: 77483
  misc_feature: 590 for SV(C|W) and mtDNA

SEQ ID NO: 84080 - DNA, 120 bp, Homo sapiens; identical to SEQ ID NO: 77876
  misc_feature: 582 for SV(C|W) and mtDNA

SEQ ID NO: 84081 - DNA, 120 bp, Homo sapiens; identical to SEQ ID NO: 78055
  misc_feature: 578 for SV(C|W) and mtDNA

SEQ ID NO: 84082 - DNA, 120 bp, Homo sapiens; identical to SEQ ID NO: 78057
  misc_feature: 578 for SV(C|W) and mtDNA

SEQ ID NO: 84083 - DNA, 120 bp, Homo sapiens; identical to SEQ ID NO: 78101
  misc_feature: 577 for SV(C|W) and mtDNA

SEQ ID NO: 84084 - DNA, 120 bp, Homo sapiens; identical to SEQ ID NO: 79374
  misc_feature: 541 for SV(C|W) and mtDNA

SEQ ID NO: 84085 - DNA, 120 bp, Homo sapiens; identical to SEQ ID NO: 79787
  misc_feature: 528 for SV(C|W) and mtDNA

SEQ ID NO: 84086 - DNA, 120 bp, Homo sapiens; identical to SEQ ID NO: 80090
  misc_feature: 519 for SV(C|W) and mtDNA

SEQ ID NO: 84087 - DNA, 120 bp, Homo sapiens; identical to SEQ ID NO: 80225
  misc_feature: 515 for SV(C|W) and mtDNA

SEQ ID NO: 84088 - DNA, 120 bp, Homo sapiens; identical to SEQ ID NO: 81040
  misc_feature: 487 for SV(C|W) and mtDNA

SEQ ID NO: 84089 - DNA, 120 bp, Homo sapiens; identical to SEQ ID NO: 81543
  misc_feature: 461 for SV(C|W) and mtDNA

SEQ ID NO: 84090 - DNA, 120 bp, Homo sapiens; identical to SEQ ID NO: 81876
  misc_feature: 439 for SV(C|W) and mtDNA

SEQ ID NO: 84091 - DNA, 120 bp, Homo sapiens; identical to SEQ ID NO: 82556
  misc_feature: 358 for SV(C|W) and mtDNA

SEQ ID NO: 84092 - DNA, 120 bp, Homo sapiens; identical to SEQ ID NO: 82589
  misc_feature: 354 for SV(C|W) and mtDNA

SEQ ID NO: 84093 - DNA, 120 bp, Homo sapiens; identical to SEQ ID NO: 82603
  misc_feature: 350 for SV(C|W) and mtDNA

SEQ ID NO: 84094 - DNA, 120 bp, Homo sapiens; identical to SEQ ID NO: 82609
  misc_feature: 349 for SV(C|W) and mtDNA

SEQ ID NO: 84095 - DNA, 120 bp, Homo sapiens; identical to SEQ ID NO: 82613
  misc_feature: 347 for SV(C|W) and mtDNA

SEQ ID NO: 84096 - DNA, 120 bp, Homo sapiens; identical to SEQ ID NO: 82615
  misc_feature: 347 for SV(C|W) and mtDNA

SEQ ID NO: 84097 - DNA, 120 bp, Homo sapiens; identical to SEQ ID NO: 82619
  misc_feature: 347 for SV(C|W) and mtDNA

SEQ ID NO: 84098 - DNA, 120 bp, Homo sapiens; identical to SEQ ID NO: 82621
  misc_feature: 346 for SV(C|W) and mtDNA

SEQ ID NO: 84099 - DNA, 120 bp, Homo sapiens; identical to SEQ ID NO: 82627
  misc_feature: 345 for SV(C|W) and mtDNA

SEQ ID NO: 84100 - DNA, 120 bp, Homo sapiens; identical to SEQ ID NO: 82629
  misc_feature: 345 for SV(C|W) and mtDNA

SEQ ID NO: 84101 - DNA, 120 bp, Homo sapiens; identical to SEQ ID NO: 82631
  misc_feature: 344 for SV(C|W) and mtDNA

SEQ ID NO: 84102 - DNA, 120 bp, Homo sapiens; identical to SEQ ID NO: 82633
  misc_feature: 344 for SV(C|W) and mtDNA

SEQ ID NO: 84103 - DNA, 120 bp, Homo sapiens; identical to SEQ ID NO: 82634
  misc_feature: 344 for SV(C|W) and mtDNA

SEQ ID NO: 84104 - DNA, 120 bp, Homo sapiens; identical to SEQ ID NO: 82636
  misc_feature: 344 for SV(C|W) and mtDNA

SEQ ID NO: 84105 - DNA, 120 bp, Homo sapiens; identical to SEQ ID NO: 82638
  misc_feature: 344 for SV(C|W) and mtDNA

SEQ ID NO: 84106 - DNA, 120 bp, Homo sapiens; identical to SEQ ID NO: 82639
  misc_feature: 344 for SV(C|W) and mtDNA

SEQ ID NO: 84107 - DNA, 120 bp, Homo sapiens; identical to SEQ ID NO: 82651
  misc_feature: 340 for SV(C|W) and mtDNA

SEQ ID NO: 84108 - DNA, 120 bp, Homo sapiens; identical to SEQ ID NO: 82652
  misc_feature: 340 for SV(C|W) and mtDNA

SEQ ID NO: 84109 - DNA, 120 bp, Homo sapiens; identical to SEQ ID NO: 82653
  misc_feature: 340 for SV(C|W) and mtDNA

SEQ ID NO: 84110 - DNA, 120 bp, Homo sapiens; identical to SEQ ID NO: 82654
  misc_feature: 340 for SV(C|W) and mtDNA

SEQ ID NO: 84111 - DNA, 120 bp, Homo sapiens; identical to SEQ ID NO: 82667
  misc_feature: 336 for SV(C|W) and mtDNA

SEQ ID NO: 84112 - DNA, 120 bp, Homo sapiens; identical to SEQ ID NO: 82669
  misc_feature: 336 for SV(C|W) and mtDNA

SEQ ID NO: 84113 - DNA, 120 bp, Homo sapiens; identical to SEQ ID NO: 82679
  misc_feature: 332 for SV(C|W) and mtDNA

SEQ ID NO: 84114 - DNA, 120 bp, Homo sapiens; identical to SEQ ID NO: 82684
  misc_feature: 332 for SV(C|W) and mtDNA

SEQ ID NO: 84115 - DNA, 120 bp, Homo sapiens; identical to SEQ ID NO: 82685
  misc_feature: 332 for SV(C|W) and mtDNA

SEQ ID NO: 84116 - DNA, 120 bp, Homo sapiens; identical to SEQ ID NO: 82686
  misc_feature: 331 for SV(C|W) and mtDNA

SEQ ID NO: 84117 - DNA, 120 bp, Homo sapiens; identical to SEQ ID NO: 82687
  misc_feature: 331 for SV(C|W) and mtDNA

SEQ ID NO: 84118 - DNA, 120 bp, Homo sapiens; identical to SEQ ID NO: 82690
  misc_feature: 330 for SV(C|W) and mtDNA

SEQ ID NO: 84119 - DNA, 120 bp, Homo sapiens; identical to SEQ ID NO: 82691
  misc_feature: 330 for SV(C|W) and mtDNA

SEQ ID NO: 84120 - DNA, 120 bp, Homo sapiens; identical to SEQ ID NO: 82692
  misc_feature: 330 for SV(C|W) and mtDNA

SEQ ID NO: 84121 - DNA, 120 bp, Homo sapiens; identical to SEQ ID NO: 82693
  misc_feature: 330 for SV(C|W) and mtDNA

SEQ ID NO: 84122 - DNA, 120 bp, Homo sapiens; identical to SEQ ID NO: 82696
  misc_feature: 329 for SV(C|W) and mtDNA

SEQ ID NO: 84123 - DNA, 120 bp, Homo sapiens; identical to SEQ ID NO: 82699
  misc_feature: 328 for SV(C|W) and mtDNA

SEQ ID NO: 84124 - DNA, 120 bp, Homo sapiens; identical to SEQ ID NO: 82701
  misc_feature: 328 for SV(C|W) and mtDNA

SEQ ID NO: 84125 - DNA, 120 bp, Homo sapiens; identical to SEQ ID NO: 82702
  misc_feature: 327 for SV(C|W) and mtDNA

SEQ ID NO: 84126 - DNA, 120 bp, Homo sapiens; identical to SEQ ID NO: 82704
  misc_feature: 326 for SV(C|W) and mtDNA

SEQ ID NO: 84127 - DNA, 120 bp, Homo sapiens; identical to SEQ ID NO: 82706
  misc_feature: 325 for SV(C|W) and mtDNA

SEQ ID NO: 84128 - DNA, 120 bp, Homo sapiens; identical to SEQ ID NO: 82709
  misc_feature: 325 for SV(C|W) and mtDNA

SEQ ID NO: 84129 - DNA, 120 bp, Homo sapiens; identical to SEQ ID NO: 82711
  misc_feature: 324 for SV(C|W) and mtDNA

SEQ ID NO: 84130 - DNA, 120 bp, Homo sapiens; identical to SEQ ID NO: 82713
  misc_feature: 323 for SV(C|W) and mtDNA

SEQ ID NO: 84131 - DNA, 120 bp, Homo sapiens; identical to SEQ ID NO: 82714
  misc_feature: 323 for SV(C|W) and mtDNA

SEQ ID NO: 84132 - DNA, 120 bp, Homo sapiens; identical to SEQ ID NO: 82715
  misc_feature: 323 for SV(C|W) and mtDNA

SEQ ID NO: 84133 - DNA, 120 bp, Homo sapiens; identical to SEQ ID NO: 82716
  misc_feature: 323 for SV(C|W) and mtDNA

SEQ ID NO: 84134 - DNA, 120 bp, Homo sapiens; identical to SEQ ID NO: 82719
  misc_feature: 322 for SV(C|W) and mtDNA

SEQ ID NO: 84135 - DNA, 120 bp, Homo sapiens; identical to SEQ ID NO: 82721
  misc_feature: 322 for SV(C|W) and mtDNA

SEQ ID NO: 84136 - DNA, 120 bp, Homo sapiens; identical to SEQ ID NO: 82723
  misc_feature: 322 for SV(C|W) and mtDNA

SEQ ID NO: 84137 - DNA, 120 bp, Homo sapiens; identical to SEQ ID NO: 82724
  misc_feature: 321 for SV(C|W) and mtDNA

SEQ ID NO: 84138 - DNA, 120 bp, Homo sapiens; identical to SEQ ID NO: 82725
  misc_feature: 321 for SV(C|W) and mtDNA

SEQ ID NO: 84139 - DNA, 120 bp, Homo sapiens; identical to SEQ ID NO: 82726
  misc_feature: 321 for SV(C|W) and mtDNA

SEQ ID NO: 84140 - DNA, 120 bp, Homo sapiens; identical to SEQ ID NO: 82727
  misc_feature: 320 for SV(C|W) and mtDNA

SEQ ID NO: 84141 - DNA, 120 bp, Homo sapiens; identical to SEQ ID NO: 82728
  misc_feature: 319 for SV(C|W) and mtDNA

SEQ ID NO: 84142 - DNA, 120 bp, Homo sapiens; identical to SEQ ID NO: 82729
  misc_feature: 319 for SV(C|W) and mtDNA

SEQ ID NO: 84143 - DNA, 120 bp, Homo sapiens; identical to SEQ ID NO: 82730
  misc_feature: 319 for SV(C|W) and mtDNA

SEQ ID NO: 84144 - DNA, 120 bp, Homo sapiens; identical to SEQ ID NO: 82733
  misc_feature: 318 for SV(C|W) and mtDNA

SEQ ID NO: 84145 - DNA, 120 bp, Homo sapiens; identical to SEQ ID NO: 82734
  misc_feature: 317 for SV(C|W) and mtDNA

SEQ ID NO: 84146 - DNA, 120 bp, Homo sapiens; identical to SEQ ID NO: 82737
  misc_feature: 317 for SV(C|W) and mtDNA

SEQ ID NO: 84147 - DNA, 120 bp, Homo sapiens; identical to SEQ ID NO: 82738
  misc_feature: 316 for SV(C|W) and mtDNA

SEQ ID NO: 84148 - DNA, 120 bp, Homo sapiens; identical to SEQ ID NO: 82741
  misc_feature: 315 for SV(C|W) and mtDNA

SEQ ID NO: 84149 - DNA, 120 bp, Homo sapiens; identical to SEQ ID NO: 82742
  misc_feature: 314 for SV(C|W) and mtDNA

SEQ ID NO: 84150 - DNA, 120 bp, Homo sapiens; identical to SEQ ID NO: 82745
  misc_feature: 312 for SV(C|W) and mtDNA

SEQ ID NO: 84151 - DNA, 120 bp, Homo sapiens; identical to SEQ ID NO: 82746
  misc_feature: 310 for SV(C|W) and mtDNA

SEQ ID NO: 84152 - DNA, 120 bp, Homo sapiens; identical to SEQ ID NO: 82749
  misc_feature: 309 for SV(C|W) and mtDNA

SEQ ID NO: 84153 - DNA, 120 bp, Homo sapiens; identical to SEQ ID NO: 82750
  misc_feature: 308 for SV(C|W) and mtDNA

SEQ ID NO: 84154 - DNA, 120 bp, Homo sapiens; identical to SEQ ID NO: 82760
  misc_feature: 300 for SV(C|W) and mtDNA

SEQ ID NO: 84155 - DNA, 120 bp, Homo sapiens; identical to SEQ ID NO: 82762
  misc_feature: 298 for SV(C|W) and mtDNA

SEQ ID NO: 84156 - DNA, 120 bp, Homo sapiens; identical to SEQ ID NO: 82763
  misc_feature: 297 for SV(C|W) and mtDNA

SEQ ID NO: 84157 - DNA, 120 bp, Homo sapiens; identical to SEQ ID NO: 82766
  misc_feature: 291 for SV(C|W) and mtDNA

SEQ ID NO: 84158 - DNA, 120 bp, Homo sapiens; identical to SEQ ID NO: 82767
  misc_feature: 290 for SV(C|W) and mtDNA

SEQ ID NO: 84159 - DNA, 120 bp, Homo sapiens; identical to SEQ ID NO: 82786
  misc_feature: 281 for SV(C|W) and mtDNA

SEQ ID NO: 84160 - DNA, 120 bp, Homo sapiens; identical to SEQ ID NO: 82787
  misc_feature: 280 for SV(C|W) and mtDNA

SEQ ID NO: 84161 - DNA, 120 bp, Homo sapiens; identical to SEQ ID NO: 82805
  misc_feature: 266 for SV(C|W) and mtDNA

SEQ ID NO: 84162 - DNA, 120 bp, Homo sapiens; identical to SEQ ID NO: 82808
  misc_feature: 265 for SV(C|W) and mtDNA

SEQ ID NO: 84163 - DNA, 120 bp, Homo sapiens; identical to SEQ ID NO: 82811
  misc_feature: 263 for SV(C|W) and mtDNA

SEQ ID NO: 84164 - DNA, 120 bp, Homo sapiens; identical to SEQ ID NO: 82812
  misc_feature: 262 for SV(C|W) and mtDNA

SEQ ID NO: 84165 - DNA, 120 bp, Homo sapiens; identical to SEQ ID NO: 82817
  misc_feature: 259 for SV(C|W) and mtDNA

SEQ ID NO: 84166 - DNA, 120 bp, Homo sapiens; identical to SEQ ID NO: 82819
  misc_feature: 257 for SV(C|W) and mtDNA

SEQ ID NO: 84167 - DNA, 120 bp, Homo sapiens; identical to SEQ ID NO: 82820
  misc_feature: 257 for SV(C|W) and mtDNA

SEQ ID NO: 84168 - DNA, 120 bp, Homo sapiens; identical to SEQ ID NO: 82821
  misc_feature: 255 for SV(C|W) and mtDNA

SEQ ID NO: 84169 - DNA, 120 bp, Homo sapiens; identical to SEQ ID NO: 82822
  misc_feature: 255 for SV(C|W) and mtDNA

SEQ ID NO: 84170 - DNA, 120 bp, Homo sapiens; identical to SEQ ID NO: 82823
  misc_feature: 254 for SV(C|W) and mtDNA

SEQ ID NO: 84171 - DNA, 120 bp, Homo sapiens; identical to SEQ ID NO: 82832
  misc_feature: 246 for SV(C|W) and mtDNA

SEQ ID NO: 84172 - DNA, 120 bp, Homo sapiens; identical to SEQ ID NO: 82833
  misc_feature: 243 for SV(C|W) and mtDNA

SEQ ID NO: 84173 - DNA, 120 bp, Homo sapiens; identical to SEQ ID NO: 82834
  misc_feature: 243 for SV(C|W) and mtDNA

SEQ ID NO: 84174 - DNA, 120 bp, Homo sapiens; identical to SEQ ID NO: 82839
  misc_feature: 241 for SV(C|W) and mtDNA

SEQ ID NO: 84175 - DNA, 120 bp, Homo sapiens; identical to SEQ ID NO: 82840
  misc_feature: 241 for SV(C|W) and mtDNA

SEQ ID NO: 84176 - DNA, 120 bp, Homo sapiens; identical to SEQ ID NO: 82847
  misc_feature: 239 for SV(C|W) and mtDNA

SEQ ID NO: 84177 - DNA, 120 bp, Homo sapiens; identical to SEQ ID NO: 82848
  misc_feature: 239 for SV(C|W) and mtDNA

SEQ ID NO: 84178 - DNA, 120 bp, Homo sapiens; identical to SEQ ID NO: 82851
  misc_feature: 239 for SV(C|W) and mtDNA

SEQ ID NO: 84179 - DNA, 120 bp, Homo sapiens; identical to SEQ ID NO: 82855
  misc_feature: 238 for SV(C|W) and mtDNA

SEQ ID NO: 84180 - DNA, 120 bp, Homo sapiens; identical to SEQ ID NO: 82863
  misc_feature: 237 for SV(C|W) and mtDNA

SEQ ID NO: 84181 - DNA, 120 bp, Homo sapiens; identical to SEQ ID NO: 82868
  misc_feature: 236 for SV(C|W) and mtDNA

SEQ ID NO: 84182 - DNA, 120 bp, Homo sapiens; identical to SEQ ID NO: 82869
  misc_feature: 236 for SV(C|W) and mtDNA

SEQ ID NO: 84183 - DNA, 120 bp, Homo sapiens; identical to SEQ ID NO: 82874
  misc_feature: 235 for SV(C|W) and mtDNA

SEQ ID NO: 84184 - DNA, 120 bp, Homo sapiens; identical to SEQ ID NO: 82876
  misc_feature: 235 for SV(C|W) and mtDNA

SEQ ID NO: 84185 - DNA, 120 bp, Homo sapiens; identical to SEQ ID NO: 82877
  misc_feature: 235 for SV(C|W) and mtDNA

SEQ ID NO: 84186 - DNA, 120 bp, Homo sapiens; identical to SEQ ID NO: 82881
  misc_feature: 235 for SV(C|W) and mtDNA

SEQ ID NO: 84187 - DNA, 120 bp, Homo sapiens; identical to SEQ ID NO: 82890
  misc_feature: 234 for SV(C|W) and mtDNA

SEQ ID NO: 84188 - DNA, 120 bp, Homo sapiens; identical to SEQ ID NO: 82891
  misc_feature: 234 for SV(C|W) and mtDNA

SEQ ID NO: 84189 - DNA, 120 bp, Homo sapiens; identical to SEQ ID NO: 82893
  misc_feature: 233 for SV(C|W) and mtDNA

SEQ ID NO: 84190 - DNA, 120 bp, Homo sapiens; identical to SEQ ID NO: 82897
  misc_feature: 232 for SV(C|W) and mtDNA

SEQ ID NO: 84191 - DNA, 120 bp, Homo sapiens; identical to SEQ ID NO: 82901
  misc_feature: 232 for SV(C|W) and mtDNA

SEQ ID NO: 84192 - DNA, 120 bp, Homo sapiens; identical to SEQ ID NO: 82908
  misc_feature: 231 for SV(C|W) and mtDNA

SEQ ID NO: 84193 - DNA, 120 bp, Homo sapiens; identical to SEQ ID NO: 82920
  misc_feature: 229 for SV(C|W) and mtDNA
